(19) United States
(12) Patent Application Publication
(10) Pub. No.: US 2020/0069786 A1
(43) Pub. Date: Mar. 5, 2020

(54) COMPOSITION AND PROCESS FOR PREPARING VACCINE

(71) Applicant: TREOS BIO ZRT., Veszprem (HU)

(72) Inventors: Levente MOLNÁR, Felsopakony (HU); Enikõ R. TÕKE, Felsopakony (HU); Julianna LISZEWICZ, Balatonalmádi (HU); József TÓTH, Gyor (HU); Orsolya LÕRINCZ, Budapest (HU); Zsolt CSISZOVSZKI, Budapest (HU); Eszter SOMOGYI, Balatonalmádi (HU); Katalin PÁNTYA, Budapest (HU); Mónika MEGYESI, Mezokeresztes (HU); Péter PÁLES, Budapest (HU)

(21) Appl. No.: 16/559,430

(22) Filed: Sep. 3, 2019

(30) Foreign Application Priority Data
Sep. 4, 2018 (GB) 1814362.8

(51) Int. Cl. A61K 39/00; C07K 16/28; A61K 39/39; C12Q 1/6881; C07K 14/74

(52) U.S. Cl. CPC A61K 39/001102; C07K 16/2827; C07K 14/70539; A61K 39/39; C12Q 1/6881; C07K 16/2818

(57) ABSTRACT

The disclosure relates to polypeptides, polynucleic acids and pharmaceutical compositions comprising polypeptides that find use in the prevention or treatment of cancer. The disclosure also relates to methods of inducing a cytotoxic T cell response in a subject or treating cancer by administering pharmaceutical compositions comprising the peptides, and companion diagnostic methods. The disclosure also relates to a method of preparing a peptide or polynucleic acid for use in a method of inducing a T cell response against a target polypeptide, wherein the method comprises identifying epitopes in the antigen that bind to multiple HLA alleles of the highest proportion of subjects in a target population.

### CROSS-REFERENCE

[0001] This application claims the benefit of GB Application No. 1814362.8 filed on Sep. 4, 2018, which application is incorporated herein by reference in its entirety.

### SEQUENCE LISTING

[0002] The instant application contains a Sequence Listing which has been submitted electronically in ASCII format and is hereby incorporated by reference in its entirety. Said ASCII copy, created on Aug. 29, 2019, is named 52895706201_SL.txt and is 1,449,508 bytes in size.

### FIELD

[0003] The disclosure relates to peptides and compositions that find use in vaccines and immunotherapy, to nucleic acids and vectors that encode such peptides, to methods of designing and producing such peptides, to methods of predicting whether an individual subject will respond to treatment with such peptides, to subject-specific compositions comprising such peptides, and to methods of treatment using such peptides.

### BACKGROUND

[0004] For decades, scientists have assumed that chronic diseases were beyond the reach of a person's natural defences. Recently, however, significant tumor regressions observed in individuals treated with antibodies that block immune inhibitory molecules have accelerated the field of cancer immunotherapy. These clinical findings demonstrate that re-activation of existing T cell responses results in meaningful clinical benefit for individuals. These advances have renewed enthusiasm for developing cancer vaccines that induce tumor specific T cell responses.

[0005] Despite the promise, current immunotherapy is effective only in a fraction of individuals. In addition, most cancer vaccine trials have failed to demonstrate statistically significant efficacy because of a low rate of tumor regression and antitumor T cell responses in individuals. Similar failures were reported with therapeutic and preventive vaccines that sought to include T cell responses in the fields of HIV and allergy. There is a need to overcome the clinical failures of immunotherapies and vaccines.

### SUMMARY

[0006] In antigen presenting cells (APC) protein antigens are processed into peptides. These peptides bind to HLA molecules and are presented on the cell surface as peptide-HLA complexes to T cells. Different individuals express different HLA molecules, and different HLA molecules present different peptides. The inventors have demonstrated that an epitope that binds to a single HLA class I allele expressed in a subject is essential, but not sufficient to induce tumor specific T cell responses. Instead tumour specific T cell responses are optimally activated when an epitope is recognised and presented by the HLA molecules encoded by at least three HLA class I genes of an individual (PCT/EP2018/055231, PCT/EP2018/055232, PCT/EP2018/055230, EP 3370065 and EP 3369431).

[0007] Based on this discovery the inventors have developed a method for designing and preparing peptides to induce T cell responses in the highest proportion of subjects in a given target human population and have used this method to design a set of peptides for use in treating cancer.

[0008] Accordingly, in a first aspect the disclosure provides a peptide of up to 50 amino acids in length and comprising the amino acid sequence of any of SEQ ID NOs: 1 to 2786 and/or 5432-5931.

[0009] In a further aspect, the disclosure provides a polynucleic acid or a vector that encodes a peptide of up to 50 amino acids in length and comprising the amino acid sequence of any of SEQ ID NOs: 1 to 2786 and/or 5432-5931.

[0010] In a further aspect, the disclosure provides a panel of two or more of the peptides or two or more of the polynucleic acids or vectors, wherein each peptide comprises, or each polynucleic acid or vector encodes a peptide that comprises, a different amino acid sequence selected from SEQ ID NOs: 1 to 2786 and/or 5432-5931.

[0011] In a further aspect, the disclosure provides a pharmaceutical composition or kit, comprising one or more of the peptides, polynucleic acids, vectors or panels, wherein the composition or kit optionally comprise at least one pharmaceutically acceptable diluent, carrier, or preservative.

[0012] In a further aspect, the disclosure provides a method of predicting that a specific human subject will have a cytotoxic T cell response and/or a helper T cell response to administration of the pharmaceutical composition or the peptides, polynucleic acids or vectors of the kit, the method comprising
[0013] (i) a. determining that the one or more peptides, or encoded peptides, of the pharmaceutical composition or kit, comprise at least one amino acid sequence that is a T cell epitope capable of binding to at least three HLA class I molecules of the subject; and
   [0014] b. predicting that the subject will have a cytotoxic T cell response to administration of the pharmaceutical composition; or
[0015] (ii) a. determining that the one or more peptides, or encoded peptides, of the pharmaceutical composition or kit comprise at least one amino acid sequence that is a T cell epitope capable of binding to at least three HLA class II molecules of the subject; and
   [0016] b. predicting that the subject will have a helper T cell response to administration of the pharmaceutical composition.

[0017] In a further aspect, the disclosure provides a method of vaccination, providing immunotherapy or inducing a cytotoxic T cell response in a subject, the method comprising administering to the subject the pharmaceutical composition or the peptides, polynucleic acids or vectors of the kit.

[0018] In further aspects, the disclosure provides
[0019] the pharmaceutical composition or the peptides, polynucleic acids or vectors of the kit described above for use in a method of vaccination, providing immunotherapy or inducing a cytotoxic T cell response in a subject; and
[0020] use of the peptides or polynucleic acids as described above in the manufacture of a medicament for vaccination, providing immunotherapy or inducing a cytotoxic T cell response in a subject.

[0021] In a further aspect, the disclosure provides a method of preparing a pharmaceutical composition or kit for use in a method of treating cancer is a specific human subject, the method comprising
[0022] a. selecting two or more peptides, or one or more polynucleic acids or vectors according that encode at least two peptides, wherein each peptide, or encoded peptide, comprises an amino acid sequence selected from SEQ ID NOs: 1 to 2786 and/or 5432-5931 that comprises a T cell epitope capable of binding to at least three HLA class I alleles and/or a T cell epitope capable of binding to at least three HLA class II alleles of the specific human subject; and
[0023] b. preparing a pharmaceutical composition or kit comprising the two or more peptides, or one or more polynucleic acids or vectors selected in step a.

[0024] In a further aspect, the disclosure provides a method of designing, or preparing a peptide, or a polynucleic acid or vector that encodes a peptide, or a panel of peptides, or one or more polynucleic acid or vectors that encode a panel of peptides, for use in a method of inducing a T cell response against a target polypeptide, the method comprising
[0025] (i) selecting or defining a model human population comprising a plurality of subjects each defined by HLA class I genotype and/or by HLA class II genotype;
[0026] (ii) identifying for each subject of the model population:
   [0027] (a) amino acid sequences of the target polypeptide that are a T cell epitope capable of binding to at least three HLA class I molecules of the subject;
   [0028] (b) amino acid sequences of the target polypeptide that are a T cell epitope capable of binding to at least three HLA class II molecules of the subject;
   [0029] (c) amino acid sequences of the target polypeptide that comprise a T cell epitope capable of binding to at least three HLA class I molecules of the subject and a T cell epitope capable of binding to at least three HLA class II molecules of the subject; or
   [0030] (d) amino acid sequences of the target polypeptide that both
      [0031] i. are a T cell epitope capable of binding to at least three HLA class II molecules; and
      [0032] ii. comprise an amino acid sequence that is a T cell epitope capable of binding to at least three HLA class I molecules of the subject;
[0033] (iii) selecting a polypeptide fragment window length of between 9 and 50 amino acids;
[0034] (iv) identifying a fragment of the target polypeptide that
   [0035] (a) has the length selected in step (iii); and
   [0036] (b) comprises an amino acid sequence identified in any one of step (ii) (a) to (d) in the highest proportion of subjects in the model population;
[0037] (v) optionally testing the fragment identified in step (iv) against additional pre-defined criteria, rejecting the fragment if the further pre-defined criteria are not met, and repeating step (iv) to identify an alternative fragment of the target polypeptide that
   [0038] (a) has the length selected in step (iii); and
   [0039] (b) comprises an amino acid sequence identified in step (iv) in the next highest proportion of subjects in the model population;
[0040] (vi) optionally repeating step (iv) and further optionally step (v) in one or more further rounds, wherein a further fragment of the target polypeptide is identified in each round, and wherein in each round subjects are excluded from the model population if any of the fragments selected in step (iv) and not rejected in step (v) of any of the preceding rounds comprises an amino acid sequence identified in step (ii) for that subject; and
[0041] (vii) designing or preparing a peptide, a polynucleic acid or vector that encodes a peptide, a panel of peptides, or one or more polynucleic acids or vectors that encode a panel of peptides, wherein each peptide comprises one or more of the target polypeptide fragments identified in step (iv), (v) or (vi), optionally wherein the polypeptide fragment is flanked at the N and/or C terminus by additional amino acids that are not part of the sequence of the target polypeptide antigen.

[0042] In a further aspect, the disclosure provides a panel peptides, polynucleic acids or vectors designed and/or prepared according to the method, or comprising or encoding two or more peptides designed and/or prepared according to the method.

[0043] In a further aspect, the disclosure provides a panel of peptides, or one or more polynucleic acids or vectors encoding a panel of peptides, for use in a method of inducing a T cell response against one or more target polypeptides in a subject of a target human population, wherein each of the peptides, or encoded peptides, comprises an amino acid sequence that is
[0044] (a) 9 to 50 amino acids in length; and
[0045] (b) comprises a fragment of the one or more target polypeptides, wherein the fragment comprises, in at least 10% of subjects of the intent-to-treat human population:
   [0046] a. an amino acid sequence of the target polypeptide that is a T cell epitope capable of binding to at least three HLA class I molecules of the subject;
   [0047] b. an amino acid sequence of the target polypeptide that is a T cell epitope capable of binding to at least three HLA class II molecules of the subject;
   [0048] c. an amino acid sequence of the target polypeptide that comprise a T cell epitope capable of binding to at least three HLA class I molecules of the subject and a T cell epitope capable of binding to at least three HLA class II molecules of the subject; or
   [0049] d. an amino acid sequence of the target polypeptide that both
      [0050] i. is a T cell epitope capable of binding to at least three HLA class II molecules; and
      [0051] ii. comprise an amino acid sequence that is a T cell epitope capable of binding to at least three HLA class I molecules of the subject.

[0052] In a further aspect, the disclosure provides a pharmaceutical composition or kit comprising the panel of peptides, or one or more polynucleic acids or vectors encoding the panel of peptides, wherein the composition or kit optionally comprises at least one pharmaceutically acceptable diluent, carrier, or preservative.

[0053] In a further aspect, the disclosure provides a method of vaccination, providing immunotherapy or inducing a cytotoxic T cell response in a subject, the method comprising administering to the subject a pharmaceutical composition or the panel of peptides, polynucleic acids or vectors of the kit.

[0054] The disclosure will now be described in more detail, by way of example and not limitation, and by reference to the accompanying drawings. Many equivalent modifications and variations will be apparent, to those skilled in the art when given this disclosure. Accordingly, the exemplary embodiments of the disclosure set forth are considered to be illustrative and not limiting. Various changes to the described embodiments may be made without departing from the scope of the disclosure. All documents cited herein, whether supra or infra, are expressly incorporated by reference in their entirety.

[0055] The present disclosure includes the combination of the aspects and preferred features described except where such a combination is clearly impermissible or is stated to be expressly avoided. As used in this specification and the appended claims, the singular forms “a”, “an”, and “the” include plural referents unless the content clearly dictates otherwise. Thus, for example, reference to “a peptide” includes two or more such peptides.

[0056] Section headings are used herein for convenience only and are not to be construed as limiting in any way.

### DESCRIPTION OF THE FIGURES

[0057] FIG. 1

[0058] ROC curve of HLA restricted PEPI biomarkers.

[0059] FIG. 2

[0060] ROC curve of ≥1 PEPI3+ Test for the determination of the diagnostic accuracy. AUC=0.73 classifies a fair diagnostic value for the PEPI biomarker.

[0061] FIGS. 3A-B

[0062] Distribution of HLA class I PEPI3+ compared to CD8+ T cell responses measured by a state of art assay among peptide pools used in the CD8+ T cell response assays. FIG. 3A: HLA class I restricted PEPI3+s. The 90% Overall Percent of Agreement (OPA) among the T cell responses and PEPI3+ peptides demonstrate the utility of the invented peptides for prediction of vaccine induced T cell response set of individuals (p<0.001). FIG. 3B: Class I HLA restricted epitopes (PEPI1+). The OPA between predicted epitopes and CD8+ T cell responses was 25% (not statistically significant). True positive (TP), both peptide and T cell responses were detected (shaded); True negative (TN): neither peptides nor T cell responses were detected (shaded); False negative (FN), only T cell responses were detected; False positive (FP), only peptide were detected.

[0063] FIGS. 4A-B

[0064] Correlation between PEPI Test predicted CD4 peptides and T-cell reactivity measured with peptide pools in patients treated with SLP vaccine. FIG. 4A: HLA class II allele-binding PEPIs; FIG. 4B: single HLA class II allele-binding epitopes. Gray: true positive (TP) and true negative (TN) responses; White: false negative (FN) and false positive (FP) responses. TP: both peptide and T cell responses were detected; TN: neither peptides nor T cell responses were detected; FN: only T cell responses were detected; FP: only peptides were detected.

[0065] FIGS. 5A-D

[0066] Multiple HLA binding peptides that define the HPV-16 LPV vaccine specific T cell response set of 20 VIN-3 and 5 cervical cancer patients. PEPI counts were compared to clinical responses after treatment with LPV. Predicted CD8+ T cell responders according to HLA class I PEPIs (FIG. 5A) and CD4+ T cell responders according to HLA class II PEPIs (FIG. 5B). Correlation between HLA class I (FIG. 5C) and class II (FIG. 5D) PEPI count and clinical response at 3 months follow-up in VIN-3 patients. Predicted T cell responders: PEPI count ≥1. Gray column, patient with HPV16 E6- and/or E7-specific T cell response; Dashed column, patient without T cell responses. CR, complete clinical responder; PR, partial clinical responder; NR, clinical non-responder.

[0067] FIGS. 6A-C

[0068] The multiple HLA class I binding peptides that define the HPV vaccine specific T cell response set of 2 patients. FIG. 6A: Four HPV antigens in the HPV vaccine. Boxes represent the length of the amino acid sequences from the N terminus to the C terminus. FIG. 6B: Process to identify the multiple HLA binding peptides of two patients: HLA sequences of the patients labelled as 4-digit HLA genotype right from the patient's ID. The location of the 1^{st} amino acid of the 54 and 91 epitopes that can bind to the patient 12-11 and patient 14-5 HLAs (PEPI1+) respectively are depicted with lines. PEPI2 represents the peptides selected from PEPI1+s that can bind to multiple HLAs of a patient (PEPI2+). PEPI3 represent peptides that can bind to HLAs of a patient (PEPI3+). PEPI4 represent peptides that can bind to HLAs of a patient (PEPI4+). PEPI5 represent peptides that can bind to HLAs of a patient (PEPI5+). PEPI6 represent peptides that can bind to 6 HLAs of a patient (PEPI6). FIG. 6C: The DNA vaccine specific PEPI3+ set of two patients characterizes their vaccine specific T cell responses.

[0069] FIG. 7

[0070] TSA expression probability targeted by IMA901 vaccine.

[0071] FIGS. 8A-B

[0072] HLA Class I allele binding properties of TUMAPs of IMA901 peptide vaccine for 2,915 common alleles. (FIG. 8A) and for the Class I genotype (6 alleles) of 51 HLA-A*02+ RCC patients. Percentages at the bottom indicate the proportion of HLAs the TUMAPs can bind to. Lines in darker grey indicate binding HLA alleles. (FIG. 8B) Probability indicates the proportion of patients who can present the indicated number of TUMAPs with their three or more HLAs. AP indicates number of antigens which can generate at least one PEPI. In this case, since both the antigens and the predicted PEPIs are 9mers (SEQ ID NOS 5958-5966, respectively, in order of appearance), AP=TUMAP=PEPI.

[0073] FIG. 9

[0074] Correlation between immune response measured for any TUMAP and immune response against expressed antigen on the tumor (AGP).

[0075] FIGS. 10A-G

[0076] Correlation study between immune response rates (IRR) and PEPI Score, between objective response rates (ORR) and MultiPEPI Scores and between objective response rates (ORR) and MultiAg PEPI Scores. FIG. 10A: Preliminary experiment to explore the relationship between PEPI Score and immune response rate of therapeutic vaccines (r²=0.7, p=0.001). FIG. 10B: IRR-PEPI Score plot. (r²=0.47, p=0.001). FIG. 10C: MultiPEPI Score and clinical response rate of therapeutic vaccines (r²=0.75, p=0.001). FIG. 10D: ORRs plotted against the MultiPEPI Score (r²=0.12, p=0.124). FIG. 10E: ORRs plotted against the MultiAg PEPI Score for vaccines with multiple antigens (r²=0.64; p=0.009). F: ORRs plotted against the MultiPEPI Score for vaccines with multiple antigens (r²=0.87; p=0.0002). FIG. 10G: ORRs plotted against the MultiPEPI Score in patients with target antigen positive disease (r²=0.56 and p=0.005). Dark grey dashed lines indicate the 95% confidence interval; light grey dashed line indicates the trendline.

[0077] FIG. 11

[0078] OBERTO trial design (NCT03391232)

[0079] FIGS. 12A-D

[0080] Antigen expression in CRC cohort of OBERTO trial (n=10). FIG. 12A: Expression frequencies of PolyPEPI1018 source antigens determined based on 2391 biopsies. FIG. 12B: PolyPEPI1018 vaccine design specified as 3 out of 7 TSAs are expressed in CRC tumors with above 95% probability. FIG. 12C: In average, 4 out of the 10 patients had pre-existing immune responses against each target antigens, referring to the real expression of the TSAs in the tumors of the patients. FIG. 12D: 7 out of the 10 patients had pre-existing immune responses against minimum of 1 TSA, in average against 3 different TSAs.

[0081] FIG. 13

[0082] Immunogenicity of PolyPEPI1018 in CRC patients confirms proper target antigen and target peptide selection. Upper part: target peptide selection and peptide design of PolyPEPI1018 vaccine composition (SEQ ID NO: 5967). Two 15mers from CRC specific CTA (TSA) selected to contain 9mer PEPI3+ predominant in representative Model population. Table: PolyPEPI1018 vaccine has been retrospectively tested during a preclinical study in a CRC cohort and was proven to be immunogenic in all tested individuals for at least one antigen by generating PEPI3+s. Clinical immune responses were measured specific for at least one antigen in 90% of patients, and multi-antigen immune responses were also found in 90% of patients against at least 2, and in 80% of patients against at least 3 antigens as tested with IFNy fluorospot assay specifically measured for the vaccine-comprising peptides.

[0083] FIGS. 14A-C

[0084] Clinical response for PolyPEPI1018 treatment. FIG. 14A: Swimmer plot of clinical responses of OBERTO trial (NCT03391232). FIG. 14B: Association progression free survival (PFS) and AGP count. FIG. 14C: Association tumour volume and AGP count.

[0085] FIG. 15

[0086] Illustration of hotspot analysis. Analysis identifies hotspots in sample of 7 patients (Pat1-Pat7) in a peptide of amino acid sequence PIVQNIQGQMVHQAISPRTLNAWVKVVEEK (SEQ ID NO: 5932). Crosses indicate position of a T cell epitope (9 mer) capable of binding to at least three HLA class I alleles (HLA class I-binding PEPI3+). Light shade indicates a T cell epitope (15 mer) capable of binding to at least four HLA class II alleles (HLA class II-binding PEPI4+). Dark shade indicates HLA class II-binding PEPI4+ with an embedded HLA class I-binding PEPI3+. The 20 mer containing a HLA class I-binding PEPI3+ in the maximum number of the 7 patients is indicated. The 20 mer containing HLA class II-binding PEPI4+ with an embedded HLA class I-binding PEPI3+ in the maximum number of the 7 patients is indicated as 1^{st} Hotspot 20 mer. This 1^{st} Hotspot might be selected in a first cycle of a method of the present disclosure. In a second cycle, Pat1, Pat2 and Pat4 may be disregarded and the indicated second Hotspot selected.

[0087] FIG. 16

[0088] Distribution of hotspot amino acid sequence selection after 30 cycles. Selection of fewer than 30 peptides indicates that no more sequences meeting the HLA-binding criteria (20 mer containing HLA class II-binding PEPI4+ with an embedded HLA class I-binding PEPI3+) could be identified in the model population.

[0089] FIG. 17

[0090] Process for Personalized Vaccination. Process consists of saliva sample collection and tumor sample collection for tumor pathology. Based on the determined HLA genotype of the patient and tumor type of the patient, 12 tumor and patient specific peptides are selected and personalized vaccine comprising the selected 12 peptides is prepared. Vaccine will be then administered to the patient by the oncologist.

[0091] FIG. 18

[0092] Feasibility study for a “simulated” Breast Cancer Clinical trial. This example demonstrates that >80% of patients could be treated with “patient-specific” vaccine selected from a “Warehouse” of 100 different peptides.

[0093] FIGS. 19A-B

[0094] Probability of vaccine antigen expression in the Patient-A's tumor cells. There is over 95% probability that 5 out of the 13 target antigens in the vaccine regimen is expressed in the patient's tumor. Consequently, the 13 peptide vaccines together can induce immune responses against at least 5 ovarian cancer antigens with 95% probability ((AGP95) FIG. 19B). It has 84% probability that each peptide will induce immune responses in the Patient-A. AGP50 (FIG. 19A) is the mean (expected value)=7.9 (it is a measure of the effectiveness of the vaccine in attacking the tumor of Patient-A).

[0095] FIG. 20

[0096] Treatment schedule of Patient-A.

[0097] FIG. 21

[0098] T cell responses of patient-A. A. Left: Vaccine peptide-specific T cell responses (20-mers). right: CD8+ cytotoxic T cell responses (9-mers). Predicted T cell responses are confirmed by bioassay.

[0099] FIG. 22

[0100] MRI findings of Patient-A treated with personalised (PIT) vaccine. This late stage, heavily pretreated ovarian cancer patient had an unexpected objective response after the PIT vaccine treatment. These MRI findings suggest that PIT vaccine in combination with chemotherapy significantly reduced her tumor burden. not appear on normal cells of the tissue in which the tumor developed.

[0101] FIGS. 23A-C

[0102] Probability of vaccine antigen expression in the Patient-B's tumor cells and treatment schedule of Patient-B. FIG. 23A: There is over 95% probability that 4 out of the 13 target antigens in the vaccine is expressed in the patient's tumor. FIG. 23B: Consequently, the 12 peptide vaccines together can induce immune responses against at least 4 breast cancer antigens with 95% probability (AGP95). It has 84% probability that each peptide will induce immune responses in the Patient-B. AGP50=6.45; it is a measure of the effectiveness of the vaccine in attacking the tumor of Patient-B. FIG. 23C: Treatment schedule of Patient-B.

[0103] FIG. 24

[0104] T cell responses of Patient-A. Left: Vaccine peptide-specific T cell responses (20-mers) of P. Right: Kinetic of vaccine-specific CD8+ cytotoxic T cell responses (9-mers). Predicted T cell responses are confirmed by bioassay.

[0105] FIG. 25

[0106] Treatment schedule of Patient-C.

[0107] FIGS. 26A-D

[0108] T cell responses of Patient-C. FIG. 26A: Vaccine peptide-specific T cell responses (20-mers). FIG. 26B: Vaccine peptide-specific CD8+ T cell responses (9-mers). FIGS. 26C-D: Kinetics of vaccine-specific CD4+ T cells and CD8+ cytotoxic T cell responses (9-mers), respectively. Long lasting immune responses both CD4 and CD 8 T cell specific are present after 14 months.

[0109] FIG. 27

[0110] Treatment schedule of Patient-D.

[0111] FIGS. 28A-B

[0112] Immune responses of Patient-D for PIT treatment. FIG. 28A: CD4+ specific T cell responses (20mer) and FIG. 28B: CD8+ T cell specific T cell responses (9mer). 0.5-4 months refer to the timespan following the last vaccination until PBMC sample collection.

### DESCRIPTION OF THE SEQUENCES

[0113] SEQ ID NOs: 1 to 2786 set forth the “hotspot” sequences from cancer antigens described in Table 25A.

[0114] SEQ ID NOs: 2787 to 5431 set forth the “hotspot” sequences from cancer antigens described in Table 28.

[0115] SEQ ID NOs: 5432 to 5931 set forth the “hotspot” sequences from cancer antigens described in Table 25B.

[0116] SEQ ID NO: 5932 sets forth the amino acid sequence shown in FIG. 15.

[0117] SEQ ID NOs: 5933 to 5945 set forth sequences of personalized vaccine of Patient-A and are described in Table 31.

[0118] SEQ ID NOs: 5946 to 5957 set forth sequences of personalized vaccine of Patient-B and are described in Table 33.

[0119] SEQ ID NOs: 5958-5966 set forth the 9mer sequences shown in FIG. 8.

[0120] SEQ ID NO: 5967 sets forth the PolyPEPI1018 vaccine peptide shown in FIG. 13.

### DETAILED DESCRIPTION

### HLA Genotypes

[0121] HLAs are encoded by the most polymorphic genes of the human genome. Each person has a maternal and a paternal allele for the three HLA class I molecules (HLA-A*, HLA-B*, HLA-C*) and four HLA class II molecules (HLA-DP*, HLA-DQ*, HLA-DRB1*, HLA-DRB3*/4*/5*). Practically, each person expresses a different combination of 6 HLA class I and 8 HLA class II molecules that present different epitopes from the same protein antigen.

[0122] The nomenclature used to designate the amino acid sequence of the HLA molecule is as follows: gene name*allele:protein number, which, for instance, can look like: HLA-A*02:25. In this example, “02” refers to the allele. In most instances, alleles are defined by serotypes—meaning that the proteins of a given allele will not react with each other in serological assays. Protein numbers (“25” in the example above) are assigned consecutively as the protein is discovered. A new protein number is assigned for any protein with a different amino acid sequence (e.g. even a one amino acid change in sequence is considered a different protein number). Further information on the nucleic acid sequence of a given locus may be appended to the HLA nomenclature, but such information is not required for the methods described herein.

[0123] The HLA class I genotype or HLA class II genotype of an individual may refer to the actual amino acid sequence of each class I or class II HLA of an individual, or may refer to the nomenclature, as described above, that designates, minimally, the allele and protein number of each HLA gene. In some embodiments, the HLA genotype of an individual is obtained or determined by assaying a biological sample from the individual. The biological sample typically contains subject DNA. The biological sample may be, for example, a blood, serum, plasma, saliva, urine, expiration, cell or tissue sample. In some embodiments the biological sample is a saliva sample. In some embodiments the biological sample is a buccal swab sample. An HLA genotype may be obtained or determined using any suitable method. For example, the sequence may be determined via sequencing the HLA gene loci using methods and protocols known in the art. In some embodiments, the HLA genotype is determined using sequence specific primer (SSP) technologies. In some embodiments, the HLA genotype is determined using sequence specific oligonucleotide (SSO) technologies. In some embodiments, the HLA genotype is determined using sequence based typing (SBT) technologies. In some embodiments, the HLA genotype is determined using next generation sequencing. Alternatively, the HLA set of an individual may be stored in a database and accessed using methods known in the art.

### HLA-Epitope Binding

[0124] A given HLA of a subject will only present to T cells a limited number of different peptides produced by the processing of protein antigens in an APC. As used herein, “display” or “present”, when used in relation to HLA, references the binding between a peptide (epitope) and an HLA. In this regard, to “display” or “present” a peptide is synonymous with “binding” a peptide.

[0125] As used herein, the term “epitope” or “T cell epitope” refers to a sequence of contiguous amino acids contained within a protein antigen that possesses a binding affinity for (is capable of binding to) one or more HLAs. An epitope is HLA- and antigen-specific (HLA-epitope pairs, predicted with known methods), but not subject specific.

[0126] The term “personal epitope”, or “PEPI” as used herein distinguishes a subject-specific epitope from an HLA specific epitope. A “PEPI” is a fragment of a polypeptide consisting of a sequence of contiguous amino acids of the polypeptide that is a T cell epitope capable of binding to one or more HLA class I molecules of a specific human subject. In other words a “PEPI” is a T cell epitope that is recognised by the HLA class I set of a specific individual. In contrast to an “epitope”, PEPIs are specific to an individual because different individuals have different HLA molecules which each bind to different T cell epitopes. In appropriate cases a “PEPI” may also refer to a fragment of a polypeptide consisting of a sequence of contiguous amino acids of the polypeptide that is a T cell epitope capable of binding to one or more HLA class II molecules of a specific human subject.

[0127] “PEPI1” as used herein refers to a peptide, or a fragment of a polypeptide, that can bind to one HLA class I molecule (or, in specific contexts, HLA class II molecule) of an individual. “PEPI1+” refers to a peptide, or a fragment of a polypeptide, that can bind to one or more HLA class I molecule of an individual.

[0128] “PEPI2” refers to a peptide, or a fragment of a polypeptide, that can bind to two HLA class I (or II) molecules of an individual. “PEPI2+” refers to a peptide, or a fragment of a polypeptide, that can bind to two or more HLA class I (or II) molecules of an individual, i.e. a fragment identified according to a method disclosed herein.

[0129] “PEPI3” refers to a peptide, or a fragment of a polypeptide, that can bind to three HLA class I (or II) molecules of an individual. “PEPI3+” refers to a peptide, or a fragment of a polypeptide, that can bind to three or more HLA class I (or II) molecules of an individual.

[0130] “PEPI4” refers to a peptide, or a fragment of a polypeptide, that can bind to four HLA class I (or II) molecules of an individual. “PEPI4+” refers to a peptide, or a fragment of a polypeptide, that can bind to four or more HLA class I (or II) molecules of an individual.

[0131] “PEPI5” refers to a peptide, or a fragment of a polypeptide, that can bind to five HLA class I (or II) molecules of an individual. “PEPI5+” refers to a peptide, or a fragment of a polypeptide, that can bind to five or more HLA class I (or II) molecules of an individual.

[0132] “PEPI6” refers to a peptide, or a fragment of a polypeptide, that can bind to all six HLA class I (or six HLA class II) molecules of an individual.

[0133] Generally speaking, epitopes presented by HLA class I molecules are about nine amino acids long. For the purposes of this disclosure, however, an epitope may be more or less than nine amino acids long, as long as the epitope is capable of binding HLA. For example, an epitope that is capable of being presented by (binding to) one or more HLA class I molecules may be between 7, or 8 or 9 and 9 or 10 or 11 amino acids long.

### Table 1. Example Software for Determining Epitope-HLA Binding

[0134] Using techniques known in the art, it is possible to determine the epitopes that will bind to a known HLA. Any suitable method may be used, provided that the same method is used to determine multiple HLA-epitope binding pairs that are directly compared. For example, biochemical analysis may be used. It is also possible to use lists of epitopes known to be bound by a given HLA. It is also possible to use predictive or modelling software to determine which epitopes may be bound by a given HLA. Examples are provided in Table 1. In some cases a T cell epitope is capable of binding to a given HLA if it has an IC50 or predicted IC50 of less than 5000 nM, less than 2000 nM, less than 1000 nM, or less than 500 nM.

TABLE 1
Example software for determining epitope-HLA binding

| EPITOPE PREDICTION TOOLS | WEB ADDRESS |
|---|---|
| BIMAS, NIH | www-bimas.cit.nih.gov/molbio/hla_bind/ |
| PPAPROC, Tubingen Univ. | |
| MHCPred, Edward Jenner Inst. of | |
| Vaccine Res. | |
| EpiJen, Edward Jenner Inst. of | http://www.ddg-pharmfac.net/epijen/EpiJen/EpiJen.htm |
| Vaccine Res. | |
| NetMHC, Center for Biological | http://www.cbs.dtu.dk/services/NetMHC/ |
| Sequence Analysis | |
| SVMHC, Tubingen Univ. | http://abi.inf.uni-tuebingen.de/Services/SVMHC/ |
| SYFPEITHI, Biomedical | http://www.syfpeithi.de/bin/MHCServer.d11/EpitopePrediction.htm |
| Informatics, Heidelberg | |
| ETK EPITOOLKIT, Tubingen | http://etk.informatik.uni-tuebingen.de/epipred/ |
| Univ. | |
| PREDEP, Hebrew Univ. Jerusalem | http://margalit.huji.ac.il/Teppred/mhc-bind/index.html |
| RANKPEP, MIF Bioinformatics | http://bio.dfci.harvard.edu/RANKPEP/ |
| IEDB, Immune Epitope Database | http://tools.immuneepitope.org/main/html/tcell_tools.html |
| EPITOPE DATABASES | WEB ADDRESS |
| MHCBN, Institute of Microbial | http://www.imtech.res.in/raghava/mhcbn/ |
| Technology, Chandigarh, INDIA | |
| SYFPEITHI, Biomedical | http://www.syfpeithi.de/ |
| Informatics, Heidelberg | |
| AntiJen, Edward Jenner Inst. of | http://www.ddg- |
| Vaccine Res. | pharmfac.net/antijen/AntiJen/antijenhomepage.htm |
| EPIMHC database of MHC | http://immunax.dfci.harvard.edu/epimhc/ |
| ligands, MIF Bioinformatics | |
| IEDB, Immune Epitope Database | http://www.iedb.org/ |

[0135] HLA molecules regulate T cell responses. Until recently, the triggering of an immune response to individual epitopes was thought to be determined by recognition of the epitope by the product of single HLA allele, i.e. HLA-restricted epitopes. However, HLA-restricted epitopes induce T cell responses in only a fraction of individuals. Peptides that activate a T cell response in one individual are inactive in others despite HLA allele matching. Therefore, it was previously unknown how an individual's HLA molecules present the antigen-derived epitopes that positively activate T cell responses.

[0136] The inventors discovered that multiple HLA expressed by an individual need to present the same peptide in order to trigger a T cell response. Therefore the fragments of a polypeptide antigen (epitopes) that are immunogenic for a specific individual (PEPIs) are those that can bind to multiple class I (activate cytotoxic T cells) or class II (activate helper T cells) HLAs expressed by that individual. This discovery is described in PCT/EP2018/055231, PCT/EP2018/055232, PCT/EP2018/055230, EP 3370065 and EP 3369431.

### Peptides

[0137] In some aspects the disclosure provides a peptide that comprises the amino acid sequence of any one of SEQ ID NOs: 1 to 2786 as shown in Table 25A and/or SEQ ID NOs: 5432 to 5931 as show in Table 25B and/or SEQ ID NOs: 2787 to 5431 shown in Table 28. Each of SEQ ID NOs: 1 to 5931 is a 20-mer fragment of a TAA, wherein the fragment comprises at least one HLA class II-binding PEPI4+ and at least one HLA class I-binding PEPI3+ embedded in the HLA class II-binding PEPI4+ in subjects of a model population of ˜16,000 subjects.

[0138] The 20-mer fragments were identified as described herein to maximise the number of subjects in the model population that would mount T cell responses to a corresponding TAA in response to administration of at least one peptide comprising one of the 20-mers for each TAA. A panel of peptides each comprising a different one or more of the 20-mer fragments, or a suitable sub-selection thereof, therefore represents an ideal panel of peptides from which to select peptides for use in vaccinating against cancer or providing immunotherapy to treat cancer in individual human subjects.

[0139] In some cases the peptides or the panel peptides of the present disclosure may (each) comprise one or more of the sequences of SEQ ID NOs: 1 to 2786 and/or 2787 to 5431 and/or 5432 to 5931 that are fragments of polypeptide antigens associated with one or more specific cancers or types of cancer, such as those of Table 24, or any other described herein. Peptides may be selected from such a panel to treat a corresponding cancer. In some cases the polypeptide antigens may have a minimum expression rate in the cancer, such as being expressed in at least about 1%, 2%, 3%, 4%, 5%, 10%, 15%, 20%, 25%, 30%, 35%, 40%, 45%, 50%, 55%, 60%, 65%, 70%, 75%, 80%, 85%, 90%, 95% of such cancers. In some cases the polypeptide antigens may be those that are most frequently expressed in the cancer, for example the 50, 45, 40, 35, 30, 25, 20, 15, 10, 9, 8, 7, 6, 5, 4, 3, 2 or 1 most commonly expressed antigens, for example as set out in Table 24.

[0140] In some cases the peptides or the panel peptides may (each) comprise peptides that comprise the sequences of SEQ ID NOs: 1 to 2786 and/or 2787 to 5431 and/or 5432 to 5931 that are fragments of a specific polypeptide antigen or family of polypeptide antigens, such as any described herein. Peptides may be selected from such a panel to treat a corresponding cancer that is associated with expression of the antigen.

[0141] In some cases the peptides or the panel peptides may (each) comprise peptides that comprise the sequences of SEQ ID NOs: 1 to 2786 and/or 2787 to 5431 and/or 5432 to 5931 that were identified by the inventors as described herein in the first 29, 28, 27, 26, 25, 24, 23, 22, 21, 20, 19, 18, 17, 16, 15, 14, 13, 12, 11, 10, 9, 8, 7, 6, 5, 4, 3, 2 or 1 cycles of the method described herein. The peptides identified in earlier cycles are those that are able to induce T cell responses against the corresponding target antigen in the highest proportion of subjects in the model population.

[0142] In some cases the panel of peptides comprises peptides that together comprise any 2, 3, 4, 5, 6, 7, 8, 9, 10, 15, 20, 25, 30, 40 or 50, 100, 200, 300, 400 or 500 of the amino acid sequences of Table 25 or Table 28, or of the amino acid sequences of Table 25 or Table 28 that are a fragment of a TAA that is associated with a cancer selected from those listed in Table 24,and/or that were obtained in the first 1, 2, 3, 4, 5, 6, 7, 8, 9, 10, 11, 12, 13, 14, 15, 16, 17, 18, 19, 20, 21, 22, 23, 24, 25, 26, 27, 28, 29 or 30 cycles as described herein.

[0143] In some cases the panel comprises or encodes at least two, or at least 3, 4, 5, 6, 7, 8, 9, 10, 11 or 12 amino acid sequence selected from SEQ ID NOs: 1 to 2786 and/or 2787 to 5431 and/or 5432 to 5931, each of which comprises a T cell epitope capable of binding to at least three HLA class I alleles and/or a T cell epitope capable of binding to at least three HLA class II alleles of an individual human subject. Such a panel is a personalised, subject-specific selection of peptides that can be used to induce T cell responses in the specific subject.

[0144] In some cases the peptides of the disclosure may be up to 50, 45, 40, 35, 34, 33, 32, 32, 31, 30, 29, 28, 27, 26, 25, 24, 23, 22, 21 or 20 amino acids in length. The peptide comprises or consists of an amino acid sequence selected from any of SEQ ID NO: 1 to 2786 and/or 2787 to 5431 and/or 5432 to 5931, which is a fragment of one or more TAAs as shown in Table 24. In some cases the fragment may comprise or consist of a longer fragment of a TAA of which the sequence of SEQ ID NO: 1 to 2786 and/or 2787 to 5431 and/or 5432 to 5931 is a part. The terms “fragment” or “fragment of a polypeptide” as used herein refer to a string of amino acids or an amino acid sequence typically of reduced length relative to the or a reference polypeptide and comprising, over the common portion, an amino acid sequence identical to the reference polypeptide. Such a fragment according to the disclosure may be, where appropriate, included in a larger polypeptide of which it is a constituent.

[0145] In some cases the fragment having the amino acid sequence of any one of SEQ ID NOs: 1 to 2786, or the longer fragment of a TAA comprising the amino acid sequence of any one of SEQ ID NOs: 1 to 2786, is flanked at the N and/or C terminus of the peptide by additional amino acids that are not part of the consecutive sequence of the TAA. In some cases the sequence may be flanked by up to 30 or 25 or 20 or 15 or 10, or 9 or 8 or 7 or 6 or 5 or 4 or 3 or 2 or 1 additional amino acid at the N and/or C terminus.

[0146] In some aspects the disclosure provides a polynucleic acid or vector that encodes one or more peptides, wherein the encoded peptides comprise the amino acid sequence of any one of SEQ ID NOs: 1 to 2786 and/or 2787 to 5431 and/or 5432 to 5931 and/or 2787 to 3997, as shown in Tables 25 and 28, or panels thereof. All of the disclosure herein relating to peptides comprising the amino acid sequence of any of SEQ ID NOs: 1 to 2786 and shown in Table 25 (and methods and compositions relating to such peptides) also applies equally to polynucleic acids or vectors encoding one of more peptides comprising the amino acid sequence of any of SEQ ID NOs: 1 to 2786 and/or 2787 to 5431 and/or 5432 to 5931 and/or 2787 to 3997.

### Methods of Designing and Producing Peptides

[0147] In some embodiments the disclosure provides methods of designing and preparing one or more peptides, or polynucleotides or vectors that encode peptides, that can optimally be used to induce T cell responses against one or more given polypeptide antigens in a given target population of subjects.

### Target Polypeptides

[0148] As used herein, the term “polypeptide” refers to a full-length protein, a portion of a protein, or a peptide characterized as a string of amino acids. As used herein, the term “peptide” refers to a short polypeptide. The peptides are typically between 9, or 10, or 11, or 12, or 13, or 14, or 15 or 16 or 17 or 18 or 19 or 20 and 20, or 21, or 22, or 23, or 24, or 25, or 26, or 27, or 28, or 29, or 30, or 35, or 40, or 45, or 50 amino acid in length. In some cases the peptide is not a 9-mer or a 15-mer. Short peptides may not be processed by antigen presenting cells and therefore bind exogenously to the HLA molecules. Thus, injected short peptides may bind in large numbers to the HLA molecules of all nucleated cells that have surface HLA class I, leading to tolerance. On the other hand polypeptides are not processed as efficiently as long peptides. Accordingly in some cases the peptides may be about 20 or 25 to about 30 or 35 amino acids in length.

[0149] The method may comprise the step of selecting one or more target polypeptide antigens. The target polypeptide antigen may be any polypeptide or fragment of a polypeptide against which it is desirable to mount a T cell response in a subject of the target population, for example a CD4+ T cell response or a CD8+ T cell response. Typically the target polypeptide is a polypeptide that is expressed by a pathogenic organism (for example, a bacteria or a parasite), a virus, a cancer cell or other disease-associated cell. In some cases the polypeptide may be present in a sample taken from a subject, such as a subject of the specific or target human population.

[0150] The polypeptide may be a Tumor Specific Antigen (TSA) and/or cancer- or tumor-associated antigen (TAA). TAAs are proteins expressed in cancer or tumor cells. Examples of TAAs include new antigens (neoantigens, which are expressed during tumorigenesis and altered from the analogous protein in a normal or healthy cell), products of oncogenes and tumor suppressor genes, overexpressed or aberrantly expressed cellular proteins (e.g. HER2, MUC1), antigens produced by oncogenic viruses (e.g. EBV, HPV, HCV, HBV, HTLV), cancer testis antigens (CTA, e.g. MAGE family, NY-ESO) and cell-type-specific differentiation antigens (e.g. MART-1). TAA sequences may be found experimentally, or in published scientific papers, or through publicly available databases, such as the database of the Ludwig Institute for Cancer Research (www.cta.lncc.br/), Cancer Immunity database (cancerimmunity.org/peptide/) and the TANTIGEN Tumor T cell antigen database (cvc.dfci.harvard.edu/tadb/). Exemplary TAAs are listed in Tables 2 and 22. A TSA is an antigen produced by a particular type of tumor that does not appear on normal cells of the tissue in which the tumor developed. TSAs include shared antigens, neoantigens, and unique antigens. In some cases the polypeptide is not expressed or is minimally expressed in normal healthy cells or tissues, but is expressed (in those cells or tissues) in a high proportion of (with a high frequency in) subjects having a particular disease or condition, such as a type of cancer or a cancer derived from a particular cell type or tissue. Alternatively, the polypeptide may be expressed at low levels in normal healthy cells, but at high levels (overexpressed) in diseased (e.g. cancer) cells or in subjects having the disease or condition. In some cases the polypeptide is expressed in, or expressed at a high level relative to normal healthy cells or subjects, in at least 1%, 2%, 3%, 4%, 5%, 10%, 15%, 20%, 25%, 30%, 35%, 40%, 45%, 50%, 55%, 60%, 65%, 70%, 75%, 80%, 85%, 90%, 95% or more of such individuals, or of a subject-matched human subpopulation or model or target population. For example the population may be matched by ethnicity, geographical location, gender, age, disease, disease type or stage, genotype, and/or expression of one or more biomarkers. Expression frequencies (rates) may be determined from published figures and scientific publications.

[0151] In some cases the target polypeptide is a cancer testis antigens (CTA). CTA are not typically expressed beyond embryonic development in healthy cells. In healthy adults, CTA expression is limited to male germ cells that do not express HLAs and cannot present antigens to T cells. Therefore, CTAs are considered expressional neoantigens when expressed in cancer cells. CTA expression is (i) specific for tumor cells, (ii) more frequent in metastases than in primary tumors and (iii) conserved among metastases of the same patient (Gajewski ed. Targeted Therapeutics in Melanoma. Springer New York. 2012).

[0152] In some cases the target polypeptide is one that is associated with or expressed by cancer cells or cancer cells of a particular type or cancer of a particular cell type of tissue. In some cases the cancer is a solid tumour. In some cases the cancer is a carcinoma, sarcoma, lymphoma, leukemia, germ cell tumor, or blastoma. The cancer may be a hormone related or dependent cancer (e.g., an estrogen or androgen related cancer) or a non-hormone related or dependent cancer. The tumor may be malignant or benign. The cancer may be metastatic or non-metastatic. The cancer may or may not be associated with a viral infection or viral oncogenes. In some cases the cancer is one or more selected from melanoma, lung cancer, renal cell cancer, colorectal cancer, bladder cancer, glioma, head and neck cancer, ovarian cancer, non-melanoma skin cancer, prostate cancer, kidney cancer, stomach cancer, liver cancer, cervix uteri cancer, oesophagus cancer, non-Hodgkin lymphoma, leukemia, pancreatic cancer, corpus uteri cancer, lip cancer, oral cavity cancer, thyroid cancer, brain cancer, nervous system cancer, gallbladder cancer, larynx cancer, pharynx cancer, myeloma, nasopharynx cancer, Hodgkin lymphoma, testis cancer, breast cancer, gastric cancer, colorectal cancer, renal cell cancer, hepatocellular cancer, pediatric cancer and Kaposi sarcoma.

[0153] The polypeptide may be a viral protein that is expressed intracellularly. Examples include HPV16 E6, E7; HIV Tat, Rev, Gag, Pol, Env; HTLV-Tax, Rex, Gag, Env, Human herpes virus proteins, Dengue virus proteins. The polypeptide may be a parasite protein that is expressed intracellularly, for example malaria proteins.

[0154] Non-limiting examples of suitable polypeptides include those listed in one or more of Tables 2 to 5.

TABLE 2
LIST OF NAMED TUMOUR ANTIGENS WITH CORRESPONDING ACCESSION NUMBERS.

| | | 5T4 | Q13641.1 | A1BG | P04217.1 | A33 | Q99795.1 |
|---|---|---|---|---|---|---|---|
| A4GALT | Q9NPC4.1 | AACT | P01011.1 | AAG | Q9M6E9.1 | ABI1 | Q8IZP0.1 |
| ABI2 | Q9NYB9.1 | ABL1 | P00519.1 | ABL-BCR | Q8WUG5.1 | ABLIM3 | O94929.1 |
| ABLL | P42684.1 | ABTB1 | Q969K4.1 | ACACA | Q13085.1 | ACBD4 | Q8NC06.1 |
| ACO1 | P21399.1 | ACRBP | Q8NEB7.1* | ACTL6A | O96019.1 | ACTL8 | Q9H568.1* |
| ACTN4 | O43707.1 | ACVR1 | Q04771.1 | ACVR1B | P36896.1 | ACVR2B | Q13705.1 |
| ACVRL1 | P37023.1 | ACS2B | Q68CK6.1 | ACSL5 | Q9ULC5.1 | ADAM-15 | Q13444.1 |
| ADAM17 | P78536.1 | ADAM2 | Q99965.1* | ADAM29 | Q9UKF5.1* | ADAM7 | Q9H2U9.1 |
| ADAP1 | O75689.1 | ADFP | Q99541.1 | ADGRA3 | Q8IWK6.1 | ADGRF1 | Q5T601.1 |
| ADGRF2 | Q8IZF7.1 | ADGRL2 | O95490.1 | ADHFE1 | Q8IWW8.1 | AEN | Q8WTP8.1 |
| AFF1 | P51825.1 | AFF4 | Q9UHB7.1 | AFP | P02771.1 | AGAP2 | Q99490.1 |
| AGO1 | Q9UL18.1 | AGO3 | Q9H9G7.1 | AGO4 | Q9HCK5.1 | AGR2 | O95994.1 |
| AIFM2 | Q9BRQ8.1 | AIM2 | O14862.1 | AKAP-13 | Q12802.1 | AKAP-3 | O75969.1* |
| AKAP-4 | Q5JQC9.1* | AKIP1 | Q9NQ31.1 | AKT1 | P31749.1 | AKT2 | P31751.1 |
| AKT3 | Q9Y243.1 | ALDH1A1 | P00352.1 | ALK | Q9UM73.1 | ALKBH1 | Q13686.1 |
| ALPK1 | Q96QP1.1 | AMIGO2 | Q86SJ2.1 | ANG2 | O15123.1 | ANKRD45 | Q5TZF3.1* |
| ANO1 | Q5XXA6.1 | ANP32A | P39687.1 | ANXA2 | P07355.1 | APC | P25054.1 |
| APEH | P13798.1 | APOA2 | P02652.1 | APOD | P05090.1 | APOL1 | O14791.1 |
| AR | P10275.1 | ARAF | P10398.1 | ARF4L | P49703.1 | ARHGEF5 | Q12774.1 |
| ARID3A | Q99856.1 | ARID4A | P29374.1 | ARL6IP5 | O75915.1 | ARMC3 | B4DXS3.1* |
| ARMC8 | Q8IUR7.1 | ARTC1 | P52961.1 | ARX | Q96QS3.1* | ATAD2 | Q6PL18.1 |
| ATIC | P31939.1 | AURKC | Q9UQB9.1 | AXIN1 | O15169.1 | AXL | P30530.1 |
| BAAT | Q14032.1 | BAFF | Q9Y275.1 | BAGE-1 | Q13072.1* | BAGE-2 | Q86Y30.1* |
| BAGE-3 | Q86Y29.1* | BAGE-4 | Q86Y28.1 | BAGE-5 | Q86Y27.1* | BAI1 | O14514.1 |
| BAL | P19835.1 | BALF2 | P03227.1 | 3ALF4 | P03188.1 | BALF5 | P03198.1 |
| BARF1 | P03228.1 | BBRF1 | P03213.1 | 3CAN | Q96GW7.1 | BCAP31 | P51572.1 |
| BCL-2 | P10415.1 | BCL2L1 | Q07817.1 | 3CL6 | P41182.1 | BCL9 | O00512.1 |
| BCR | P11274.1 | BCRF1 | P03180.1 | 3DLF3 | P03224.1 | BGLF4 | P13288.1 |
| BHLF1 | P03181.1 | BHRF1 | P03182.1 | 3ILF1 | P03208.1 | BILF2 | P03218.1 |
| BIN1 | O00499.1 | BING-4 | O15213.1 | 3IRC7 | Q96CA5.1 | BLLF1 | P03200.1 |
| BLLF2 | P03199.1 | BMI1 | P35226.1 | 3MLF1 | Q04360.1 | BMPR1B | O00238.1 |
| BMRF1 | P03191.1 | BNLF2a | P0C739.1 | 3NLF2b | Q8AZJ3.1 | BNRF1 | P03179.1 |
| BRAF1 | P15056.1 | BRD4 | O60885.1 | BRDT | Q58F21.1* | BRI3BP | Q8WY22.1 |
| BRINP1 | O60477.1 | BRLF1 | P03209.1 | 3TBD2 | Q9BX70.1 | BUB1B | O60566.1 |
| BVRF2 | P03234.1 | BXLF1 | P03177.1 | 3ZLF1 | P03206.1 | C15orf60 | Q7Z4M0.1* |
| CA 12-5 | Q8WXI7.1 | CA 19-9 | Q969X2.1 | CA195 | Q5TG92.1 | CA9 | Q16790.1 |
| CABYR | O75952.1* | CADM4 | Q8NFZ8.1 | CAGE1 | Q8CT20.1* | CALCA | P01258.1 |
| CALR3 | Q96L12.1 | CAN | P35658.1 | CASC3 | O15234.1 | CASC5 | Q8NG31.1* |
| CASP5 | P51878.1 | CASP8 | Q14790.1 | CBFA2T2 | O43439.1 | CBFA2T3 | O75081.1 |
| CBL | P22681.1 | CBLB | Q13191.1 | CC3 | Q9BUP3.1 | CCDC110 | Q8TBZ0.1* |
| CCDC33 | Q8N5R6.1* | CCDC36 | Q8IYA8.1* | CCDC6 | Q16204.1 | CCDC62 | Q6P9F0.1* |
| CCDC68 | Q9H2F9.1 | CCDC83 | Q8IWF9.1* | CCL13 | Q99616.1 | CCL2 | P13500.1 |
| CCL7 | P80098.1 | CCNA1 | P78396.1* | CCNA2 | P20248.1 | CCNB1 | P14635.1 |
| CCND1 | P24385.1 | CCNE2 | O96020.1 | CCNI | Q14094.1 | CCNL1 | Q9UK58.1 |
| CCR2 | P41597.1 | CD105 | P17813.1 | CD123 | P26951.1 | CD13 | P15144.1 |
| CD133 | O43490.1 | CD137 | Q07011.1 | CD138 | P18827.1 | CD157 | Q10588.1 |
| CD16A | P08637.1 | CD178 | P48023.1 | CD19 | P15391.1 | CD194 | P51679.1 |
| CD2 | P06729.1 | CD20 | P11836.1 | CD21 | P20023.1 | CD22 | P20273.1 |
| CD229 | Q9HBG7.1 | CD23 | P06734.1 | CD27 | P26842.1 | CD28 | P10747.1 |
| CD30 | P28908.1 | CD317 | Q10589.1 | CD33 | P20138.1 | CD350 | Q9ULW2.1 |
| CD36 | P16671.1 | CD37 | P11049.1 | CD4 | P01730.1 | CD40 | P25942.1 |
| CD40L | P29965.1 | CD45 | P08575.1 | CD47 | Q08722.1 | CD51 | P06756.1 |
| CD52 | P31358.1 | CD55 | P08174.1 | CD61 | P05106.1 | CD70 | P32970.1 |
| CD74 | P08922.1 | CD75 | P15907.1 | CD79B | P40259.1 | CD80 | P33681.1 |
| CD86 | P42081.1 | CD8a | P01732.1 | CD8b | P10966.1 | CD95 | P25445.1 |
| CD98 | P08195.1 | CDC123 | O75794.1 | CDC2 | P06493.1 | CDC27 | P30260.1 |
| CDC73 | Q6P1J9.1 | CDCA1 | Q9BZD4.1* | CDCP1 | Q9H5V8.1 | CDH3 | P22223.1 |
| CDK2AP1 | O14519.1 | CDK4 | P11802.1 | CDK7 | P50613.1 | CDKN1A | P38936.1 |
| CDKN2A | P42771.1 | CEA | P06731.1 | CEACAM1 | Q86UE4.1 | CENPK | Q9BS16.1 |
| CEP162 | Q5TB80.1 | CEP290 | O15078.1* | CEP55 | Q53EZ4.1* | CFL1 | P23528.1 |
| CH3L2 | Q15782.1 | CHEK1 | O14757.1 | CK2 | P19784.1 | CLCA2 | Q9UQC9.1 |
| CLOCK | O15516.1 | CLPP | Q16740.1 | CMC4 | P56277.1 | CML66 | Q96RS6.1 |
| CO-029 | P19075.1 | COTL1 | Q14019.1 | COX2 | P35354.1 | COX6B2 | Q6YFQ2.1* |
| CPSF1 | Q10570.1 | CPXCR1 | Q8N123.1* | CREBL2 | O60519.1 | CREG1 | O75629.1 |
| Cripto | P13385.1 | CRISP2 | P16562.1* | *CRK | P46108.1 | CRKL | P46109.1 |
| CRLF2 | Q9HC73.1 | CSAGE | Q6PB30.1 | CT45 | Q5HYN5.1* | CT45A2 | Q5DJT8.1* |
| CT45A3 | Q8NHU0.1* | CT45A4 | Q8N7B7.1* | CT45A5 | Q6NSH3.1* | CT45A6 | P0DMU7.1* |
| CT46 | Q86X24.1* | CT47 | Q5JQC4.1* | CT47B1 | P0C2P7.1* | CTAGE2 | Q96RT6.1* |
| cTAGE5 | O15320.1* | CTCFL | Q8NI51.1* | CTDSP2 | O14595.1 | CTGF | P29279.1 |
| CTLA4 | P16410.1 | CTNNA2 | P26232.1* | CTNNB1 | P35222.1 | CTNND1 | O60716.1 |
| CTSH | P09668.1 | CTSP1 | A0RZH4.1* | CTTN | Q14247.1 | CXCR4 | P61073.1 |
| CXorf48 | Q8WUE5.1* | CXorf61 | Q5H943.1* | Cyclin-E | P24864.1 | CYP1B1 | Q16678.1 |
| CypB | P23284.1 | CYR61 | O00622.1 | CS1 | P28290.1 | CSAG1 | Q6PB30.1* |
| CSDE1 | O75534.1 | CSF1 | P09603.1 | CSF1R | P07333.1 | CSF3R | Q99062.1 |
| CSK | P41240.1 | CSK23 | Q8NEV1.1 | DAPK3 | O43293.1 | DAZ1 | Q9NQZ3.1 |
| DBPC | Q9Y2T7.1 | DCAF12 | Q5T6F0.1* | DCT | P40126.1 | DCUN1D1 | Q96GG9.1 |
| DCUN1D3 | Q8IWE4.1 | DDR1 | Q08345.1 | DDX3X | O00571.1 | DDX6 | P26196.1 |
| DEDD | O75618.1 | DEK | P35659.1 | DENR | O43583.1 | DEPDC1 | Q5TB30.1 |
| DFNA5 | O60443.1 | DGAT2 | Q96PD7.1 | DHFR | P00374.1 | DKK1 | O94907.1 |
| DKK3 | Q9UBP4.1 | DKKL1 | Q9UK85.1* | DLEU1 | O43261.1 | DMBT1 | Q9UGM3.1 |
| DMRT1 | Q9Y5R6.1* | DNAJB8 | Q8NHS0.1* | DNAJC8 | O75937.1 | DNMT3A | Q9Y6K1.1 |
| DPPA2 | Q7Z7J5.1* | DR4 | O00220.1 | DR5 | O14763.1 | DRG1 | Q9Y295.1* |
| DSCR8 | Q96T75.1 | E2F3 | O00716.1 | E2F6 | O75461.1 | E2F8 | A0AVK6.1 |
| EBNA1 | P03211.1 | EBNA2 | P12978.1 | EBNA3 | P12977.1 | EBNA4 | P03203.1 |
| EBNA6 | P03204.1 | EBNA-LP | Q8AZK7.1 | E-cadherin | P12830.1 | ECT2 | Q9H8V3.1 |
| ECTL2 | Q008S8.1 | EDAG | Q9BXL5.1* | EEF2 | P13639.1 | EFNA1 | P20827.1 |
| EFS | O43281.1 | EFTUD2 | Q15029.1 | EGFL7 | Q9UHF1.1 | EGFR | p00533.1 |
| EI24 | O14681.1 | EIF4EBP1 | Q13541.1 | ELF3 | P78545.1 | ELF4 | Q99607.1 |
| ELOVL4 | Q9GZR5.1* | EMP1 | P54849.1 | ENAH | Q8N8S7.1 | Endosialin | Q9HCU0.1 |
| ENO1 | P06733.1 | ENO2 | P09104.1 | ENO3 | P13929.1 | ENTPD5 | O75356.1 |
| EpCAM | P16422.1 | EPHA2 | P29317.1 | EPHA3 | P29320.1 | EPHB2 | P29323.1 |
| EPHB4 | P54760.1 | EPHB6 | O15197.1 | EPS8 | Q12929.1 | ERBB3 | P21860.1 |
| ERBB4 | Q15303.1 | EREG | O14944.1 | ERG | P11308.1 | ERVK-18 | O42043.1 |
| ERVK-19 | O71037.1 | ESR1 | P03372.1 | ETAA1 | Q9NY74.1 | ETS1 | P14921.1 |
| ETS2 | P15036.1 | ETV1 | P50549.1 | ETV5 | P41161.1 | ETV6 | P41212.1 |
| EVI5 | O060447.1 | EWSR1 | Q01844.1 | EYA2 | O00167.1 | EZH2 | Q15910.1 |
| FABP7 | O15540.1 | FAM133A | Q8N9E0.1* | FAM13A | O94988.1 | F2M46D | Q8NEK8.1* |
| FAM58BP | P0C7Q3.1 | FANCG | O15287.1 | FATE1 | Q969F0.1* | FBXO39 | Q8N4B4.1* |
| FBXW11 | Q9UKB1.1 | FCHSD2 | O94868.1 | FER | P16591.1 | FES | P07332.1 |
| FEV | Q99581.1 | FGF10 | O15520.1 | FGF23 | Q9GZV9.1 | FGF3 | P11487.1 |
| FGF4 | P08620.1 | FGF5 | P12034.1 | FGFR1 | P11362.1 | FGFR2 | P21802.1 |
| FGFR3 | P22607.1 | FGFR4 | P22455.1 | FGR | P09769.1 | FLI1 | Q01543.1 |
| FLT3 | P36888.1 | FMNL1 | O95466.1 | FMOD | Q06828.1 | FMR1NB | Q8N0W7.1* |
| FN1 | P02751.1 | Fn14 | Q9NP84.1 | FNIP2 | Q9P278.1 | FOLR1 | P15328.1 |
| FOS | P01100.1 | FosB | P53539.1 | FOSL1 | P15407.1 | FOXM1 | Q08050.1 |
| FOXO1 | Q12778.1 | FOXO3 | O43524.1 | FRAT1 | Q92837.1 | FRMD3 | A2A2Y4.1 |
| FSIP1 | Q8NA03.1 | FSIP2 | Q5CZC0.1 | FSTL3 | O95633.1 | FTHL17 | Q9BXU8.1* |
| FUNDC2 | Q9BWH2.1 | FUS | P35637.1 | FUT1 | P19526.1 | FUT3 | P21217.1 |
| FYN | P06241.1 | GAB2 | Q9UQC2.1 | GADD45G | O95257.1 | GAGE-1 | Q13065.1 |
| GAGE12B/C/D/E | | GAGE12F | P0CL80.1 | GAGE12G | P0CL81.1 | GAGE12H | A6NDE8.1 |
| A1L429.1 | | | | | | | |
| GAGE12I | P0CL82.1 | GAGE12J | A6NER3.1 | GAGE-2 | Q6NT46.1 | GAGE-3 | Q13067.1 |
| GAGE-4 | Q13068.1 | GAGE-5 | Q13069.1 | GAGE-6 | Q13070.1 | GAGE-7 | O76087.1 |
| GAGE-8 | Q9UEU5.1 | GALGT2 | Q00973.1 | GAS7 | O60861.1 | GASZ | Q8WWH4.1 |
| GATA-3 | P23771.1 | GBU4-5 | Q587J7.1 | GCDFP-15 | P12273.1 | GFAP | P14136.1 |
| GFI1 | Q99684.1 | Ghrelin | Q9UBU3.1 | GHSR | Q92847.1 | GIPC1 | O14908.1 |
| GITR | Q9Y5U5.1 | GKAP1 | Q5VSY0.1 | GLI1 | P08151.1 | Glypican-3 | P51654.1 |
| GML | Q99445.1 | GNA11 | P29992.1 | GNAQ | P50148.1 | GNB2L1 | P63244.1 |
| GOLGA5 | Q8TBA6.1 | gp100 | P40967.1 | gp75 | P17643.1 | Gp96 | P14625.1 |
| GPAT2 | Q6NUI2.1* | GPATCH2 | Q9NW75.1* | GPC-3 | P51654.1 | GPNMB | Q14956.1 |
| GPR143 | P51810.1 | GPR89A | B7ZAQ6.1 | GRB2 | P62993.1 | GRP78 | P11021.1 |
| GUCY1A3 | Q02108.1 | H3F3A | P84243.1 | HAGE | Q9NXZ2.1* | hANP | P01160.1 |
| HBEGF | Q99075.1 | hCG-beta | P01233.1 | HDAC1 | Q13547.1 | HDAC2 | Q92769.1 |
| HDAC3 | O15379.1 | HDAC4 | P56524.1 | HDAC5 | Q9UQL6.1 | HDAC6 | Q9UBN7.1 |
| HDAC7 | Q8WUI4.1 | HDAC8 | Q9BY41.1 | HDAC9 | Q9UKV0.1 | HEATR1 | Q9H583.1 |
| Hepsin | P05981.1 | Her2/neu | P04626.1 | HERC2 | O95714.1 | HERV-K104 | P61576.1 |
| HEXB | P07686.1 | HEXIM1 | O94992.1 | HGRG8 | Q9Y5A9.1 | HIPK2 | Q9H2X6.1 |
| HJURP | Q8NCD3.1 | HMGB1 | P09429.1 | HMOX1 | P09601.1 | HNRPL | P14866.1 |
| HOM-TES-85 | Q9P127.1* | HORMAD1 | Q86X24.1* | HORMAD2 | Q8N7B1.1* | HPSE | Q9Y251.1 |
| HPV16 E6 | P03126.1 | HPV16 E7 | P03129.1 | HPV18 E6 | P06463.1 | HPV18 E7 | P06788.1 |
| HRAS | P01112.1 | HSD17B13 | Q7Z5P4.1 | HSP105 | Q92598.1 | HSP60 | P10809.1 |
| HSPA1A | P08107.1 | HSPB9 | Q9BQS6.1* | HST-2 | P10767.1 | HT001 | Q2TB18.1 |
| hTERT | O14746.1 | HUS1 | O60921.1 | ICAM-1 | P05362.1 | IDH1 | O75874.1 |
| IDO1 | P14902.1 | IER3 | P46695.1 | IGF1R | P08069.1 | IGFS11 | Q5DX21.1* |
| IL13RA2 | Q14627.1* | IMP-3 | Q9NV31.1* | ING3 | Q9NXR8.1 | INPPL1 | O15357.1 |
| INTS6 | Q9UL03.1 | IRF4 | Q15306.1 | IRS4 | O14654.1 | ITGA5 | P08648.1 |
| ITGB8 | P26012.1 | ITPA | Q9BY32.1 | ITPR2 | Q14571.1 | JAK2 | O60674.1 |
| JAK3 | P52333.1 | JARID1B | Q9UGL1.1* | JAZF1 | Q86VZ6.1 | JNK1 | P45983.1 |
| JNK2 | P45984.1 | JNK3 | P53779.1 | JTB | O76095.1 | JUN | P05412.1 |
| JUP | P14923.1 | K19 | P08727.1 | KAAG1 | Q9UBP8.1 | Kallikrein 14 | |
| | | | | | | | Q9P0G3.1 |
| Kallikrein 4 | Q9Y5K2.1 | KAT6A | Q92794.1 | KDM1A | O60341.1 | KDM5A | P29375.1 |
| KIAA0100 | Q14667.1* | KIAA0336 | Q8IWJ2.1 | KIAA1199 | Q8WUJ3.1 | KIAA1641 | A6QL64.1 |
| KIF11 | P52732.1 | KIF1B | O60333.1 | KIF20A | O95235.1 | KIT | P10721.1 |
| KLF4 | O43474.1 | KLHL41 | O60662.1 | KLK10 | O43240.1 | KMT2D | O14686.1 |
| KOC1 | O00425.1 | K-ras | P01116.1 | KRIT1 | O00522.1 | KW-12 | P62913.1 |
| KW-2 | Q96RS0.1 | KW-5 (SEBD4) | Q9H0Z9._ | KW-7 | O75475.1 | L1CAM | P32004.1 |
| L53 | Q96EL3.1 | L6 | Q9BTT4.1 | LAG3 | P18627.1 | Lage-1 | O75638.1* |
| LATS1 | O95835.1 | LATS2 | Q9NRM7.1 | LCMT2 | O60294.1 | LCP1 | P13796.1 |
| LDHC | P07864.1* | LDLR | P01130.1 | LEMD1 | Q68G75.1* | Lengsin | Q5TDP6.1 |
| LETMD1 | Q6P1Q0.1 | LGALS3BP | Q08380.1 | LGALS8 | O00214.1 | LIN7A | O14910.1 |
| LIPI | Q6XZB0.1* | LIV-1 | Q13433.1 | LLGL1 | Q15334.1 | LMO1 | P25800.1 |
| LMO2 | P25791.1 | LMP1 | P03230.1 | LMP2 | P13285.1 | LOC647107 | Q8TAI5.1* |
| LOXL2 | Q9Y4K0.1 | LRP1 | Q07954.1 | LRRN2 | O75325.1 | LTF | P02788.1 |
| LTK | P29376.1 | LZTS1 | Q9Y250.1 | LY6K | Q17RY6.1* | LYN | P07948.1 |
| LYPD6B | Q8NI32.1* | MAEA | Q7L5Y9.1 | MAEL | Q96JY0.1* | MAF | O75444.1 |
| MAFF | Q9ULX9.1 | MAFG | O15525.1 | MAFK | O60675.1 | MAGE-A1 | P43355.1* |
| MAGE-A10 | P43363.1* | MAGE-A11 | P43364.1* | MAGE-A12 | P43365.1* | MAGE-A2 | P43356.1* |
| MAGE-A2B | Q6P448.1* | MAGE-A3 | P43357.1* | MAGE-A4 | P43358.1* | MAGE-A5 | P43359.1* |
| MAGE-A6 | P43360.1* | MAGE-A8 | P43361.1* | MAGE-A9 | P43362.1* | MAGE-B1 | P43366.1* |
| MAGE-B2 | O15479.1* | MAGE-B3 | O15480.1* | MAGE-B4 | O15481.1* | MAGE-B5 | Q9BZ81.1* |
| MAGE-B6 | Q8N7X4.1* | MAGE-C1 | O60732 .1* | MAGE-C2 | Q9UBF1.1* | MAGE-C3 | Q8TD91.1* |
| mammaglobin-A | | MANF | P55145.1 | MAP2K2 | P36507.1 | MAP2K7 | O14733.1 |
| | Q13296.1 | | | | | | |
| MAP3K7 | O43318.1 | MAP4K5 | Q9Y4K4.1 | MART1 | Q16655.1 | MART-2 | Q5VTY9.1 |
| MAS1 | P04201.1 | MC1R | Q01726.1 | MCAK | Q99661.1* | MCF2 | P10911.1 |
| MCF2L | O15068.1 | MCL1 | Q07820.1 | MCTS1 | Q9ULC4.1 | MCSP | Q6UVK1.1 |
| MDK | P21741.1 | MDM2 | Q00987.1 | MDM4 | O15151.1 | ME1 | P48163.1 |
| ME491 | P08962.1 | MECOM | Q03112.1 | MELK | Q14680.1 | MEN1 | O00255.1 |
| MERTK | Q12866.1 | MET | P08581.1 | MFGE8 | Q08431.1 | MFHAS1 | Q9Y4C4.1 |
| MFI2 | P08582.1 | MGAT5 | Q09328.1 | Midkine | P21741.1 | MIF | P14174.1 |
| MK167 | P46013.1 | MLH1 | P40692.1 | MLL | Q03164.1 | MLLT1 | Q03111.1 |
| MLLT10 | P55197.1 | MLLT11 | Q13015.1 | MLLT3 | P42568.1 | MLLT4 | P55196.1 |
| MLLT6 | P55198.1 | MMP14 | P50281.1 | MMP2 | P08253.1 | MMP7 | P09237.1 |
| MMP9 | P14780.1 | MOB3B | Q86TA1.1 | MORC1 | Q86VD1.1* | MPHOSPH1 | Q96Q89.1* |
| MPL | P40238.1 | MRAS | O14807.1 | MRP1 | P33527.1 | MRP3 | O15438.1 |
| MRPL28 | Q13084.1 | MRPL30 | Q8TCC3.1 | MRPS11 | P82912.1 | MSLN | Q13421.1 |
| MTA1 | Q13330.1 | MTA2 | O94776.1 | MTA3 | Q9BTC8.1 | MTCP1 | P56278.1 |
| MTSS1 | O43312.1 | MUC-1 | P15941.1 | MUC-2 | Q02817.1 | MUC-3 | Q02505.1 |
| MUC-4 | Q99102.1 | MUC-5AC | P98088.1 | MUC-6 | Q6W4X9.1 | MUM1 | Q2TAK8.1 |
| MUM2 | Q9Y5R8.1 | MYB | P10242.1 | MYC | P01106.1 | MYCL | P12524.1 |
| MYCLP1 | P12525.1 | MYCN | P04198.1 | MYD88 | Q99836.1 | MYEOV | Q96EZ4.1 |
| MYO1B | O43795.1 | NA88-A | P0C5K6.1* | NAE1 | Q13564.1 | Napsin-A | O96009.1 |
| NAT6 | Q93015.1 | NBAS | A2RRP1.1 | NBPF12 | Q5TAG4.1 | NCOA4 | Q13772.1 |
| NDC80 | O14777.1 | NDUFC2 | O95298.1 | Nectin-4 | Q96NY8.1 | NEK2 | P51955.1 |
| NEMF | O60524.1 | NENF | Q9UMX5.1 | NEURL1 | O76050.1 | NFIB | O00712.1 |
| NFKB2 | Q00653.1 | NF-X1 | Q12986.1 | NFYC | Q13952.1 | NGAL | P80188.1 |
| NGEP | Q6IWH7.1 | NKG2D-L1 | Q9BZM6.1 | NKG2D-L2 | Q9BZM5.1 | NKG2D-L3 | Q9BZM4.1 |
| NKG2D-L4 | Q8TD07.1 | NKX3.1 | Q99801.1 | NLGN4X | Q8N0W4.1 | NLRP4 | Q96MN2.1* |
| NNMT | P40261.1 | NOL4 | O94818.1* | NOTCH2 | Q04721.1 | NOTCH3 | Q9UM47.1 |
| NOTCH4 | Q99466.1 | NOV | P48745.1 | NPM1 | P06748.1 | NR6A1 | Q15406.1* |
| N-RAS | P01111.1 | NRCAM | Q92823.1 | NRP1 | O14786.1 | NSE1 | Q96KN4.1 |
| NSE2 | Q96KN1.1 | NTRK1 | P04629.1 | NUAK1 | O60285.1 | NUGGC | Q68CJ6.1 |
| NXF2 | Q9GZY0.1* | NXF2B | Q5JRM6.1* | NY-BR-1 | Q9BXX3.1 | NYD-TSPG | Q9BWV7.1 |
| NY-ESO-1 | P78358.1* | NY-MEL-1 | P57729.1 | OCA2 | Q04671.1 | ODF1 | Q14990.1* |
| ODF2 | Q5BJF6.1* | ODF3 | Q96PU9.1* | ODF4 | Q2M2E3.1* | OGG1 | O15527.1 |
| OGT | O15294.1 | OIP5 | O43482.1* | OS9 | Q13438.1 | OTOA | Q05BM7.1* |
| OX40 | P43489.1 | OX40L | P23510.1 | P53 | P04637.1 | P56-LCK | P06239.1 |
| PA2G4 | Q9UQ80.1 | PAGE1 | O75459.1* | PAGE2 | Q7Z2X2.1* | PAGE2B | Q5JRK9.1* |
| PAGE3 | Q5JUK9.1* | PAGE4 | O60829.1* | PAGE5 | Q96GU1.1* | PAK2 | Q13177.1 |
| PANO1 | I0J062.1 | PAP | Q06141.1 | PAPOLG | Q9BWT3.1 | PARK2 | O60260.1 |
| PARK7 | Q99497.1 | PARP12 | Q9H0J9.1 | PASD1 | Q8IV76.1* | PAX3 | P23760.1 |
| PAX5 | Q02548.1 | PBF | P00751.1 | PBK | Q96KB5.1* | PBX1 | P40424.1 |
| PCDC1 | Q15116.1 | PCM1 | Q15154.1 | PCNXL2 | A6NKB5.1 | PDGFB | P01127.1 |
| PDGFRA | P16234.1 | PEPP2 | Q9HAU0.1* | PGF | P49763.1 | PGK1 | P00558.1 |
| PHLDA3 | Q9Y5J5.1 | PHLPP1 | O60346.1 | PIAS1 | O75925.1 | PIAS2 | O75928.1 |
| PIK3CA | P42336.1 | PIK3CD | O00329.1 | PIK3R2 | O00459.1 | PIM1 | P11309.1 |
| PIM2 | Q9P1W9.1 | PIM3 | Q86V86.1 | PIR | O00625.1 | PIWIL1 | Q96J94.1* |
| PIWIL2 | Q8TC59.1* | PIWIL3 | Q7Z3Z3.1 | PIWIL4 | Q7Z3Z4.1 | PKN3 | Q6P5Z2.1 |
| PLA2G16 | P53816.1 | PLAC1 | Q9HBJ0.1* | PLAG1 | Q6DJT9.1 | PLEKHG5 | O94827.1 |
| PLK3 | Q9H4B4.1 | PLS3 | P13797.1 | PLVAP | Q9BX97.1 | PLXNB1 | O43157.1 |
| PLXNB2 | O15031.1 | PML | P29590.1 | PML-RARA | Q96QH2.1 | POTEA | Q6S8J7.1* |
| POTEB | Q6S5H4.1* | POTEC | B2RU33.1* | POTED | Q86YR6.1* | POTEE | Q6S8J3.1* |
| POTEG | Q6S5H5.1* | POTEH | Q6S545.1* | PP2A | P63151.1 | PPAPDC1B | Q8NEB5.1 |
| PPFIA1 | Q13136.1 | PPIG | Q13427.1 | PPP2R1B | P30154.1 | PRAME | P78395.1* |
| PRDX5 | P30044.1 | PRKAA1 | Q13131.1 | PRKCI | P41743.1 | PRM1 | P04553.1* |
| PRM2 | P04554.1* | PRMT3 | O60678.1 | PRMT6 | Q96LA8.1 | PDL1 | Q9NZQ7.1 |
| PROM1 | O43490.1 | PRSS54 | Q6PEW0.1* | PRSS55 | Q6UWB4.1* | PRTN3 | P24158.1 |
| PRUNE | Q86TP1.1 | PRUNE2 | Q8WUY3.1 | PSA | P07288.1 | PSCA | D3DWI6.1 |
| PSMA | Q04609.1 | PSMD10 | O75832.1 | PSGR | Q9H255.1 | PSP-94 | Q1L6U9.1 |
| PTEN | P60484.1 | PTH-rP | P12272.1 | PTK6 | Q13882.1 | PTPN20A | Q4JDL3.1* |
| PTPRK | Q15262.1 | PTPRZ | P23471.1 | PTTG-1 | O95997.1 | PTTG2 | Q9NZH5.1 |
| PTTG3 | Q9NZH4.1 | PXDNL | A1KZ92.1 | RAB11FIP3 | O75154.1 | RAB8A | P61006.1 |
| RAD1 | O60671.1 | RAD17 | O75943.1 | RAD51C | O43502.1 | RAF1 | P04049.1 |
| RAGE-1 | Q9UQ07.1 | RAP1A | P62834.1 | RARA | P10276.1 | RASSF10 | A6NK89.1 |
| RB1 | P06400.1 | RBL2 | Q08999.1 | RBM46 | Q8TBY0.1* | RBP4 | P02753.1 |
| RCAS1 | O00559.1 | RCVRN | P35243.1 | RECQL4 | O94761.1 | RET | P07949.1 |
| RGS22 | Q8NE09.1* | RGS5 | O15539.1 | RHAMM | O75330.1 | RhoC | P08134.1 |
| RHOXF2 | Q9BQY4.1 | RL31 | P62888.1 | RNASET2 | O00584.1 | RNF43 | Q68DV7.1 |
| RNF8 | O76064.1 | RON | Q04912.1 | ROPN1A | Q9HAT0.1* | ROR1 | Q01973.1 |
| RPA1 | O95602.1 | RPL10A | P62906.1 | RPL7A | P62424.1 | RPS2 | P15880.1 |
| RPS6KA5 | O75582.1 | RPSA | P08865.1 | RQCD1 | Q92600.1* | RRAS2 | P62070.1 |
| RSL1D1 | O76021.1 | RTKN | Q9BST9.1 | RUNX1 | Q01196.1 | RUNX2 | Q13950.1 |
| RYK | P34925.1 | SAGE1 | Q9NXZ1.1* | SART2 | Q9UL01.1 | SART3 | Q15020.1 |
| SASH1 | O94885.1 | sCLU | P10909.1 | SCRN1 | Q12765.1 | SDCBP | O00560.1 |
| SDF-1 | P48061.1 | SDHD | O14521.1 | SEC31A | O94979.1 | SEC63 | Q9UGP8.1 |
| Semaphorin 4D | | SEMG1 | P04279.1* | SFN | P31947.1 | SH2B2 | O14492.1 |
| | Q92854.1 | | | | | | |
| SH2D1B | O14796.1 | SH3BP1 | Q9Y3L3.1 | SHB | Q15464.1 | SHC3 | Q92529.1 |
| SIRT2 | Q8IXJ6.1 | SIVA1 | O15304.1 | SKI | P12755.1 | SLBP | A9UHW6.1 |
| SLC22A10 | Q63ZE4.1 | SLC25A47 | Q6Q0C1.1 | SLC35A4 | Q96G79.1 | SLC45A3 | Q96JT2.1 |
| SLC4A1AP | Q9BWU0.1 | SLCO6A1 | Q86UG4.1* | SLITRK6 | Q9H5Y7.1 | Sm23 | P27701.1 |
| SMAD5 | Q99717.1 | SMAD6 | O43541.1 | SMO | Q99835.1 | Smt 3B | P61956.1 |
| SNRPD1 | P62314.1 | SOS1 | Q07889.1 | SOX-2 | P48431.1 | SOX-6 | P35712.1 |
| SOX-11 | P35716 .1 | SPA17 | Q15506.1* | SPACA3 | Q8IXA5.1* | SPAG1 | Q07617.1* |
| SPAG17 | Q6Q759.1* | SPAG4 | Q9NPE6.1* | SPAG6 | O75602.1* | SPAG8 | Q99932.1* |
| SPAG9 | O60271.1* | SPANXA1 | Q9NS26.1* | SPANXB | Q9NS25.1* | SPANXC | Q9NY87.1* |
| SPANXD | Q9BXN6.1* | SPANXE | Q8TAD1.1* | SPANXN1 | Q5VSR9.1* | SPANXN2 | Q5MJ10.1* |
| SPANXN3 | Q5MJ09.1* | SPANXN4 | Q5MJ08.1* | SPANXN5 | Q5MJ07.1* | SPATA19 | Q7Z5L4.1* |
| SPEF2 | Q9C093.1* | SPI1 | P17947.1 | SPINLW1 | O95925.1* | SPO11 | Q9Y5K1.1* |
| SRC | P12931.1 | SSPN | Q14714.1 | SSX-1 | Q16384.1* | SSX-2 | Q16385.1* |
| SSX-3 | Q99909.1* | SSX-4 | O60224.1* | SSX-5 | O60225.1* | SSX-6 | Q7RTT6.1* |
| SSX-7 | Q7RTT5.1* | SSX-9 | Q7RTT3.1* | ST18 | O60284.1 | STAT1 | P42224.1 |
| STEAP1 | Q9UHE8.1 | STK11 | Q15831.1 | STK25 | O00506.1 | STK3 | Q13188.1 |
| STN | Q9H668.1 | SUPT7L | O94864.1 | Survivin | O15392.1 | SUV39H1 | O43463.1 |
| SYCE1 | Q8N0S2.1 | SYCP1 | Q15431.1 | SYCP3 | Q8IZU3.1 | SYT | Q15532.1 |
| TA-4 | Q96RI8.1 | TACC1 | O75410.1 | TAF1B | Q53T94.1 | TAF4 | O00268.1 |
| TAF7L | Q5H9L4.1* | TAG-1 | Q02246.1* | TAL1 | P17542.1 | TAL2 | Q16559.1 |
| TAPBP | O15533.1 | TATI | P00995.1 | TAX1BP3 | O14907.1 | TBC1D3 | Q8IZP1.1 |
| TBP-1 | P17980.1 | TCL1A | P56279.1 | TCL1B | O95988.1 | TDHP | Q9BT92.1 |
| TDRD1 | Q9BXT4.1* | TDRD4 | Q9BXT8.1* | TDRD6 | O60522.1* | TEKT5 | Q96M29.1* |
| TEX101 | Q9BY14.1* | TEX14 | Q8IWB6.1* | TEX15 | Q9BXT5.1* | TEX38 | Q6PEX7.1* |
| TF | P02787.1 | TFDP3 | Q5H9I0.1* | TFE3 | P19532.1 | TGFBR1 | P36897.1 |
| TGFBR2 | P37173.1 | THEG | Q9P2T0.1* | TIE2 | Q02763.1 | TIPRL | O75663.1 |
| TLR2 | O60603.1 | TMEFF1 | Q8IYR6.1* | TMEFF2 | Q9UIK5.1* | TMEM108 | Q6UXF1.1* |
| TMEM127 | O75204.1 | TMPRSS12 | Q86WS5.1* | TNC | P24821.1 | TNFRSF17 | Q02223.1 |
| TNFSF15 | O95150.1 | TNK2 | Q07912.1 | TOMM34 | Q15785.1 | TOP2A | P11388.1 |
| TOP2B | Q02880.1 | TOR3A | Q9H497.1 | TP73 | O15350.1 | TPA1 | 8N543.1 |
| TPGS2 | Q68CL5.1 | TPI1 | P60174.1 | TPL2 | P41279.1 | TPM4 | P67936.1 |
| TPO | P40225.1 | TPPP2 | P59282.1* | TPR | P12270.1 | TPTE | P56180.1* |
| TRAF5 | O000463.1 | TRAG-3 | Q9Y5P2.1* | TRGC2 | P03986.1 | TRIM24 | O15164.1 |
| TRIM37 | O94972.1 | TRIM68 | Q6AZZ1.1 | TRPM8 | Q7Z2W7.1 | TSGA10 | Q9BZW7.1* |
| TSP50 | Q9UI38.1* | TSPAN6 | O43657.1 | TSPY1 | Q01534.1* | TSPY2 | A6NKD2.1* |
| TSPY3 | Q6B019.1* | TSPYL1 | Q9H0U9.1 | TSSK6 | Q9BXA6.1* | TTC23 | Q5W5X9.1 |
| TTK | P33981.1* | TULP2 | O00295.1* | TUSC2 | O75896.1 | TWEAK | O43508.1 |
| TXNIP | Q9H3M7.1 | TYMS | P04818.1 | TYR | P14679.1 | U2 snRNP B | P08579.1 |
| U2AF1 | Q01081.1 | UBD | O15205.1 | UBE2A | P49459.1 | UBE2C | O00762.1 |
| UBE2V1 | Q13404.1 | UBE4B | O95155.1 | UBR5 | O95071.1 | UBXD5 | Q5T124.1 |
| UFL1 | O94874.1 | URI1 | O94763.1 | URLC10 | Q17RY6.1 | UROC1 | Q96N76.1 |
| USP2 | O75604.1 | USP4 | Q13107.1 | VAV1 | P15498.1 | VCX3A | Q9NNX9.1 |
| VEGFR1 | P17948.1 | VEGFR2 | P35968.1 | VHL | P40337.1 | VIM | P08670.1 |
| VWA5A | O00534.1 | WHSC2 | Q9H3P2.1 | WISP1 | O95388.1 | WNK2 | Q9Y3S1.1 |
| WNT10B | O00744.1 | WNT3 | P56703.1 | WNT-5a | P41221.1 | WT1 | P19544.1 |
| WWP1 | Q9H0M0.1 | XAGE-1 | Q9HD64.1* | XAGE-2 | Q96GT9.1* | XAGE-3 | Q8WTP9.1* |
| XAGE-4 | Q8WWM0.1 | XAGE-5 | Q8WWM1.1* | XBP1 | P17861.1 | XPO1 | O14980.1 |
| XRCC3 | O43542.1 | YB-1 | P67809.1 | YEATS4 | O95619.1 | YES1 | P07947.1 |
| YKL-40 | P36222.1 | ZBTB7A | O95365.1 | ZBTB7C | A1YPR0.1 | ZEB1 | P37275.1 |
| ZFYVE19 | Q96K21.1 | ZNF165 | P49910.1* | ZNF185 | O15231.1 | ZNF217 | O75362.1 |
| ZNF320 | A2RRD8.1 | ZNF395 | Q9H8N7.1 | ZNF645 | Q8N7E2.1* | ZUBR1 | Q5T4S7.1 |
| ZW10 | O43264.1 | ZWINT | O95229.1 | Ropporin-lA | Q9HAT0 | WBP2NL | Q6ICG8.1 |

Table 2 optionally excludes Ropporin-1A Q9HAT0 and/or WBP2NL Q6ICG8.1.
CTAs/TSAs = bold and *

TABLE 3
LIST OF ACCESSION NUMBERS FOR VIRAL ANTIGENS FROM IEDB

| | Q76R62.1 | P03182.1 | P09258.1 | P09310.1 | P03227.1 | P89466.1 | P04601.1 |
|---|---|---|---|---|---|---|---|
| P13285.1 | P09991.1 | P03468.1 | A2T3Q0.1 | P0C6X7.1 | P89448.1 | P12978.1 | P09257.1 |
| P50641.1 | P14075.1 | 20178567.1 | Q01023.1 | P03188.1 | P04585.1 | P0C767.1 | P12977.1 |
| P89467.1 | Q9W850.1 | Q00683.1 | P04591.1 | P03211.1 | 9628706.1 | P03460.1 | P08666.1 |
| P03485.1 | Q04360.1 | Q913Y7.1 | P89449.1 | Q81871.1 | P03452.1 | P17763.1 | P89430.1 |
| P03410.1 | P04012.1 | P27958.1 | Q6WB99.1 | P25212.1 | Q9PZT1.1 | P68593.1 | P03203.1 |
| P29996.1 | 9629374.1 | P59633.1 | O42053.1 | P0C6L3.1 | P59635.1 | Q9YZN9.1 | Q6WB95.1 |
| P10233.1 | P89475.1 | Q6WB98.1 | Q6SW67.1 | Q7TFA0.1 | P0CK17.1 | P59594.1 | 1980491.1 |
| P14079.1 | P15423.1 | 1891762.1 | P09259.1 | P09269.1 | Q77Q38.1 | Q786F2.1 | Q6SW99.1 |
| P24771.1 | F5HB98.1 | 9629370.1 | P68336.1 | P03300.1 | 1980486.1 | Q69027.1 | P28284.1 |
| P13290.1 | 9626585.1 | P06923.1 | P14076.1 | P03346.1 | O42062.1 | P07566.1 | P03204.1 |
| Q69091.1 | P09255.1 | P03206.1 | O36634.1 | P10205.1 | F5HCM1.1 | P0CK16.1 | Q6WB97.1 |
| Q85601.1 | P89468.1 | Q69467.1 | P03218.1 | Q786F3.1 | P59637.1 | 1891763.1 | Q6W394.1 |
| P03231.1 | Q9IK92.1 | Q6WBA1.1 | P03466.1 | P14335.1 | P26670.1 | Q9PZT0.1 | 1985356.1 |
| Q2HR63.1 | P59634.1 | Q6SW59.1 | P03277.1 | P59595.1 | Q69028.1 | P03383.1 | P03261.1 |
| P03200.1 | P04578.1 | P06484.1 | F5HC97.1 | S5TC82.1 | P18095.1 | Q96895.1 | P18094.1 |
| 9629372.1 | P50791.1 | P03230.1 | P13845.1 | 9629712.1 | P03209.1 | P03129.1 | Q76R61.1 |
| P03228.1 | P0C206.1 | Q9WMB5.1 | P03226.1 | Q9QR69.1 | O36633.1 | O42049.1 | P03496.1 |
| P03428.1 | P03431.1 | P0C0U1.1 | P03433.1 | P03508.1 | 1980456.1 | P0C739.1 | P69726.1 |
| P69723.1 | 1980490.1 | 532129755.1 | P03120.1 | P04020.1 | P06922.1 | P03114.1 | P03314.1 |
| P06790.1 | P06788.1 | P06927.1 | P03101.1 | P03107.1 | P06794.1 | 530787712.1 | P04013.1 |
| Q80872.1 | P04014.1 | P03126.1 | P36811.1 | P06463.1 | P26554.1 | P04016.1 | P14078.1 |
| P03191.1 | 1980471.1 | P06821.1 | P0C797.1 | F5HF49.1 | P0C045.1 | P04296.1 | P04485.1 |
| P10230.1 | P10221.1 | P06487.1 | P10215.1 | P04293.1 | P10211.1 | P10209.1 | P10225.1 |
| P10224.1 | P10238.1 | P10185.1 | P08392.1 | P10231.1 | P06492.1 | P04290.1 | P08393.1 |
| P08543.1 | P10210.1 | P08617.1 | F5HB53.1 | P04019.1 | P04015.1 | P89442.1 | P89452.1 |
| P89462.1 | P59632.1 | O36635.1 | P07210.1 | Q83884.1 | Q8JUX5.1 | P03089.1 | Q66479.1 |
| P03185.1 | P0CAP6.1 | P04618.1 | 56160929.1 | 1980519.1 | P08669.1 | P14348.1 | P03212.1 |
| P03179.1 | 45617- | 1511872.1 | 302317869.1 | P69899.1 | P09247.1 | Q05127.1 | P18272.1 |
| | other.1 | | | | | | |
| Q9YMG2.1 | Q05128.1 | 302371215.1 | 302371218.1 | Q5XX08.1 | 302371214.1 | P14336.1 | 138948- |
| | | | | | | | other.1 |
| P08292.1 | 1803956.1 | P35253.1 | 1891726.1 | P09308.1 | P03189.1 | 667489389.1 | P09272.1 |
| 34365530.1 | Q05320.1 | P59596.1 | P32886.1 | 55097.1 | P03316.1 | P03276.1 | Q81870.1 |
| Q81862.1 | 64320.1 | 1933190.1 | | | | | |

TABLE 4
LIST OF ACCESSION NUMBERS FOR BACTERIAL ANTIGENS FROM IEDB

| | | | | | | | |
|---|---|---|---|---|---|---|---|
| | B8ZUD1.1 | P09621.1 | P9WPE5.1 | Q2GI62.1 | P0A5B8.1 | O50443.1 | Q5NEZ3.1 |
| P9WQF5.1 | P9WK95.1 | O05311.1 | P9WQD7.1 | P9WKG3.1 | P9WHE5.1 | P0CD83.1 | P9WHB9.1 |
| P9WH91.1 | P9WHE3.1 | P9WNK7.1 | A0A0F3MKF3.1 | A1JIP3.1 | B2RKS6.1 | P0A1D3.1 | P0A6F5.1 |
| P0COZ7.1 | P0C923.1 | P61439.1 | Q9Z708.1 | P0A521.1 | P9WPE7.1 | Q79FJ2.1 | B8ZR84.1 |
| I6Y3P5.1 | Q2FYP2.1 | P9WG41.1 | P96890.1 | O06625.1 | I6X654.1 | Q8YIE1.1 | P9WQ81.1 |
| I6XWA1.1 | P11311.1 | O53900.1 | P9WIR7.1 | P9WQB1.1 | B8ZUC6.1 | O06802.1 | P9WMK1.1 |
| P9WG37.1 | Q2FWC4.1 | Q2GGE3.1 | O33347.1 | P9WJ09.1 | P9WJ11.1 | P9WF23.1 | O69703.1 |
| I6X4K0.1 | B2RM93.1 | P71888.1 | P9WFW3.1 | P9WPV1.1 | P9WPU7.1 | P9WPV3.1 | P9WPU5.1 |
| O50391.1 | P9WID7.1 | P9WPC3.1 | P96901.1 | O84848.1 | Q2FUX4.1 | A0A0M1YNY3.1 | P49944.1 |
| P9WPQ9.1 | Q45010.1 | Q2FZK7.1 | P9WMN3.1 | P9WPQ1.1 | Q45013.1 | O53666.1 | Q5NEH1.1 |
| P9WHR5.1 | P9WIE5.1 | Q5NEQ3.1 | P9WNF3.1 | F2QBN0.1 | B8ZTB7.1 | P0C922.1 | P9WMJ9.1 |
| Q5NGW2.1 | P01556.1 | Q8DMZ4.1 | P33768.1 | Q2FUY2.1 | Q5NG56.1 | X8CE55.1 | Q5NGE4.1 |
| P94973.1 | O06827.1 | P96872.1 | I6X9Y7.1 | I6XFZ8.1 | O50442.1 | O53697.1 | O53978.1 |
| P95137.1 | P95144.1 | O53519.1 | Q79FZ8.1 | P9WJF5.1 | P71629.1 | P9WJS3.1 | P9WPB7.1 |
| Q7D911.1 | P9WHS1.1 | O06393.1 | P9WP69.1 | P9WPN5.1 | P9WNX3.1 | O53380.1 | I6YAU3.1 |
| P0A4V2.1 | P9WQP3.1 | P0C212.1 | P9WQP1.1 | P9WQN9.1 | O53311.1 | P9WIS7.1 | O06159.1 |
| H2GU79.1 | Q2G2Q0.1 | P9WNV1.1 | P9WNV5.1 | Q8YE98.1 | Q59191.1 | P9WGY7.1 | P9WGY9.1 |
| Q2G2W1.1 | P9WGH1.1 | P9WNG9.1 | P9WNG7.1 | O84591.1 | Q9Z7A6.1 | P9WGR1.1 | P96404.1 |
| I6YGS0.1 | Q6MX18.1 | P9WNK5.1 | O53692.1 | P9WNK3.1 | P9WNK1.1 | P9WNJ9.1 | P9WNJ7.1 |
| P9WNJ5.1 | P9WNJ3.1 | P9WNJ1.1 | P9WNI9.1 | P96903.1 | P9WNB1.1 | P9WJE1.1 | P9WJD9.1 |
| P9WJD7.1 | P9WJD3.1 | P9WJC5.1 | P9WJC3.1 | P9WJC1.1 | P9WNQ3.1 | P9WJE5.1 | P9WJC7.1 |
| O84646.1 | I6YDV4.1 | P11439.1 | Q5NFJ1.1 | P9WNE5.1 | P14738.1 | P11089.1 | H7C7G3.1 |
| L7N6B9.1 | I6XFI7.1 | O05578.1 | P96218.1 | P9WN39.1 | P9WN59.1 | Q8YBI3.1 | P9WN83.1 |
| P9WJA9.1 | P9WMY9.1 | Q5NH51.1 | O53673.1 | P9WIP9.1 | P0CE15.1 | P72041.1 | Q5NEM8.1 |
| Q5NI16.1 | P9WJA3.1 | P0A4Q1.1 | P9WIP1.1 | P9WIN9.1 | P9WNF5.1 | O50846.1 | Q59947.1 |
| H7C7N8.1 | Q5NEC6.1 | O84606.1 | P9WQJ9.1 | P9WQJ7.1 | P9WQ71.1 | O53611.1 | P9WKL1.1 |
| P9WKJ7.1 | D5V9Y8.1 | P0CC04.1 | P23700.1 | P9WJN5.1 | Q5NHJ0.1 | Q5NEY9.1 | P15917.1 |
| Q2G155.1 | O34094.1 | Q8F8E1.1 | O69661.1 | H6MMU4.1 | P9WK61.1 | P9WK55.1 | Q8YGS9.1 |
| O50811.1 | P9WQ59.1 | P9WIN7.1 | P9WIR1.1 | O50430.1 | D5VCH6.1 | Q5NHI7.1 | P9WFU9.1 |
| I6XFY8.1 | B2RH54.1 | Q46409.1 | P30690.1 | A0A0J5IWN3.1 | A0PSI5.1 | A4TAC4.1 | B1MB69.1 |
| B2HSY2.1 | B8ZSN3.1 | E4WHS0.1 | P9WK17.1 | V5XE39.1 | I6X7G8.1 | I6Y461.1 | I6YGB1.1 |
| I6YC99.1 | Q79FY7.1 | I6X5Z8.1 | I6Y479.1 | I6YA32.1 | O05461.1 | Q2G1E2.1 | P9WK19.1 |
| I6YAW3.1 | Q5NGG4.1 | O51624.1 | P9WJW5.1 | Q50584.1 | B2RHG1.1 | Q5NFL7.1 | P9WQN7.1 |
| P9WHH3.1 | O84639.1 | Q5NF24.1 | P9WJH1.1 | P9WJH5.1 | O53203.1 | P55969.1 | O50418.1 |
| Q5NGE0.1 | H7C7K8.1 | O54584.1 | G1UB30.1 | Q5NH85.1 | G1UB25.1 | P0A3N8.1 | E1X6Y5.1 |
| Q5NEP7.1 | Q8YHH0.1 | P38006.1 | P43838.1 | P43839.1 | P0CL67.1 | P0CL66.1 | Q0SLZ0.1 |
| Q07337.1 | G5IXI6.1 | O07721.1 | O53254.1 | P75330.1 | I6Y936.1 | L7N649.1 | L7N656.1 |
| L7N693.1 | Q79FK4.1 | Q79FR3.1 | Q79FR5.1 | Q79G04.1 | Q79FS8.1 | Q6MWX1.1 | Q79FV6.1 |
| Q79FS5.1 | Q79FQ7.1 | Q79FP3.1 | Q79FP2.1 | Q79FK9.1 | Q79FE6.1 | I6XEF1.1 | Q79FD4.1 |
| Q6MX26.1 | Q6MX50.1 | L7N680.1 | O53695.1 | I6X8R2.1 | O53246.1 | I6Y0L1.1 | Q2G282.1 |
| P14283.1 | P04977.1 | P9WMX7.1 | P9WFR1.1 | P9WN09.1 | O86345.1 | P9WGU1.1 | P9WGT9.1 |
| P9WGT7.1 | P9WPF7.1 | P9WIB3.1 | P9WMM9.1 | P9WHM5.1 | P9WQE9.1 | Q8DQ08.1 | Q8DQ07.1 |
| I6Y231.1 | P9WHV9.1 | O05877.1 | O07236.1 | O86370.1 | O06404.1 | O06410.1 | B8ZRL2.1 |
| O06807.1 | O33269.1 | Q79FA9.1 | Q79FK6.1 | Q8VKN2.1 | L7N675.1 | Q79FK5.1 | L0T7Y7.1 |
| Q79FI9.1 | Q79FE1.1 | Q6MWX9.1 | O84616.1 | O84647.1 | P9WQ27.1 | O84288.1 | I6X9S5.1 |
| P9WJW3.1 | P9WPS9.1 | P95149.1 | O53632.1 | I6Y293.1 | L0T243.1 | P9WP43.1 | P9WKC9.1 |
| P96402.1 | P71810.1 | O06417.1 | P96365.1 | L0T532.1 | P96264.1 | P9WJK5.1 | P9WJQ9.1 |
| O84419.1 | O84818.1 | Q8YG32.1 | O06608.1 | O07175.1 | P9WGA3.1 | O53323.1 | P96354.1 |
| P9WIM9.1 | B8ZRT2.1 | P9WK93.1 | P13423.1 | O84583.1 | P9WG63.1 | P9WIM1.1 | P9WKJ3.1 |
| P9WNZ7.1 | P9WK31.1 | Q50701.1 | P9WID3.1 | Q8YC41.1 | P9WPL3.1 | P9WNI3.1 | P9WNI7.1 |
| P9WNI5.1 | P9WQ49.1 | P9WMG1.1 | Q2GGR3.1 | P9WK71.1 | O33192.1 | P9WND5.1 | P9WFL9.1 |
| P9WMB7.1 | P9WJ79.1 | P9WND7.1 | Q63RA7.1 | Q631D0.1 | I6YET7.1 | Q9S010.1 | P9WGC9.1 |
| Q50700.1 | Q5NFR6.1 | P9WGK3.1 | P9WHI1.1 | P9WHV3.1 | Q5NIA7.1 | P9WG27.1 | P9WF73.1 |
| P9WGA1.1 | P9WIB9.1 | P9WGL3.1 | O51381.1 | P9WI83.1 | P9WI79.1 | P9WFT7.1 | Q8YGS6.1 |
| P05788.1 | P17835.1 | P9WIK9.1 | Q5NHP7.1 | P9WJU5.1 | P9WGE7.1 | Q2G2B2.1 | P04958.1 |
| P9WG67.1 | P9WKE1.1 | O07226.1 | P9WJ13.1 | P9WHF3.1 | P9WF43.1 | Q7D7L0.1 | P9WMF9.1 |
| P9WGN1.1 | P9WKJ9.1 | P60230.1 | P9WKH7.1 | O53699.1 | P9WHT7.1 | P9WJS5.1 | Q5NII0.1 |
| Q8YDZ3.1 | Q9RPX7.1 | P9WN67.1 | O05576.1 | Q5NHL4.1 | P9WN15.1 | P9WMD5.1 | P9WMF5.1 |
| P9WG85.1 | P9WJW7.1 | P9WIH1.1 | P9WIG1.1 | P9WIG3.1 | P9WIF5.1 | P9WIF1.1 | P9WIE7.1 |
| P9WHW9.1 | P9WI41.1 | P9WI39.1 | P9WI37.1 | P9WI25.1 | Q11031.1 | P9WI47.1 | P9WI23.1 |
| P9WI19.1 | P9WI11.1 | P9WI45.1 | P9WI07.1 | P9WI05.1 | Q79FH3.1 | P9WI43.1 | P9WHZ7.1 |
| P9WHZ5.1 | P9WHZ3.1 | P9WHY9.1 | P9WHY7.1 | P9WHY5.1 | Q6MX07.1 | P9WHY3.1 | Q6MWY2.1 |
| Q50703.1 | P9WHX3.1 | P96221.1 | Q7D589.1 | P9WMA3.1 | P9WKW1.1 | P9WKS9.1 | P9WM29.1 |
| P9WGC1.1 | P9WLZ5.1 | P9WLZ3.1 | P9WLX1.1 | P9WLV9.1 | P9WLS7.1 | P9WLQ1.1 | P9WLJ1.1 |
| P9WLH9.1 | P9WLF3.1 | P9WL97.1 | P9WL87.1 | P9WL85.1 | P9WL83.1 | P9WL67.1 | P9WL63.1 |
| P9WL51.1 | P9WL47.1 | P9WNH3.1 | P9WGL7.1 | P9WQM5.1 | P9WPD9.1 | A0A098A1N7.1 | A0A098A2B0.1 |
| A2RGM0.1 | A5LVF6.1 | A5MKZ9.1 | B8ZQI8.1 | B8ZQM3.1 | B8ZQT5.1 | B8ZR82.1 | B8ZRH1.1 |
| B8ZS71.1 | B8ZS85.1 | B8ZS86.1 | B8ZSJ5.1 | B8ZSL3.1 | B8ZSL7.1 | B8ZSM6.1 | B8ZT30.1 |
| B8ZTD0.1 | B8ZTS2.1 | B8ZTV5.1 | B8ZU53.1 | B8ZUA4.1 | B8ZUE5.1 | B8ZUF0.1 | B8ZUT6.1 |
| B8ZUX6.1 | C0R9U8.1 | C6DPT8.1 | C6DQ35.1 | E1XJN6.1 | G8W6L3.1 | G8W6L7.1 | G8W6U7.1 |
| H6MNY3.1 | H6MQD5.1 | H8HRN0.1 | H8HW90.1 | H8L8K3.1 | I6TQ53.1 | I6TX52.1 | P0C5B9.1 |
| Q1BYS7.1 | R4MDK6.1 | S5F815.1 | W6GWM1.1 | P9WFC9.1 | P9WFJ9.1 | P14916.1 | P69996.1 |
| P9WFC5.1 | Q8VKQ6.1 | P9WHS3.1 | A5MKI6.1 | | | | |

TABLE 5
LIST OF ACCESSION NUMBERS FOR FUNGAL ANTIGENS FROM IEDB and UNIPROT

| | | | | | | | |
|---|---|---|---|---|---|---|---|
| Q5ANA3.1 | Q5A3P6.1 | Q59VM7.1 | Q5A1A9.1 | Q5APF0.1 | Q8J0P4.1 | Q4WHG0.1 | Q4WQ87.1 |
| Q59X67.1 | Q59Z17.1 | Q59ZI3.1 | Q5AA33.1 | B8N4Q9.1 | Q4WAW6.1 | Q4WAJ6.1 | Q4X1V0.1 |
| A0A1D8PQ86.1 | Q59ZB1.1 | Q873N2.1 | Q59L72.1 | B8NIF0.1 | P46075.1 | Q4WCL1.1 | Q4WRP2.1 |
| Q59L12.1 | Q59LC9.1 | P48989.1 | Q5AFC2.1 | B8N406.1 | Q4WGL5.1 | Q9HEQ8.1 | Q4WVI6.1 |
| P46593.1 | P82611.1 | Q5ADV5.1 | Q59SG9.1 | P41750.1 | O00092.1 | Q4WEN1.1 | Q4WCV3.1 |
| P0DJ06.1 | O94038.1 | Q59WD3.1 | Q59RQ0.1 | B8NM71.1 | Q4WLW8.1 | Q4WI37.1 | Q4WNI1.1 |
| P29717.1 | P46589.1 | Q59W04.1 | Q59RK9.1 | B8MYS6.1 | Q8X176.1 | Q4WZS1.1 | Q4WQH4.1 |
| Q9UW14.1 | Q5AF56.1 | Q59VN0.1 | P31353.1 | B8N8Q9.1 | Q96UX3.1 | Q4WDA4.1 | Q4WDE1.1 |
| Q92207.1 | P83773.1 | Q59WB9.1 | Q5ACM4.1 | B8N8R3.1 | Q4WPF5.1 | Q4WLS7.1 | Q4WJT7.1 |
| Q5A8T7.1 | Q59YU1.1 | Q59P53.1 | Q5ACI8.1 | B8N417.1 | Q92450.1 | Q4WWM6.1 | Q4WLG1.1 |
| Q5A8T4.1 | Q59YV2.1 | Q5A432.1 | Q5AB93.1 | B8N8R0.1 | Q4WAW9.1 | Q4WP81.1 | Q4WQR6.1 |
| P43076.1 | Q5ABE5.1 | Q5AK64.1 | Q5ALL8.1 | B8NM74.1 | A4GYZ0.1 | Q6MYT0.1 | Q4WZS2.1 |
| Q5AP53.1 | Q59LF2.1 | A0A1D8PNZ7.1 | Q5A4X8.1 | B8N106.1 | Q4WAW3.1 | Q4WTL0.1 | Q4WXP0.1 |
| Q5AL52.1 | Q8NJN3.1 | Q59Q30.1 | Q5AD34.1 | B8NHY4.1 | Q70J59.1 | Q4WXV2.1 | Q4WU59.1 |
| P43079.1 | Q5ALN1.1 | A0A1D8PN12.1 | Q59V02.1 | B8NJG8.1 | Q4X1A4.1 | Q4X0Z3.1 | Q4WUG4.1 |
| Q5AD07.1 | Q59S72.1 | Q5AK24.1 | Q5AHC0.1 | B8NM66.1 | E9R876.1 | Q4WN25.1 | Q4WIK9.1 |
| Q5A0E5.1 | Q59K86.1 | Q5AFT2.1 | Q59Y11.1 | B8MYL0.1 | M4VQY9.1 | Q4WN21.1 | Q4WYP0.1 |
| Q5AKU6.1 | Q5AGD1.1 | Q5A0W6.1 | Q59QA5.1 | B8NM62.1 | Q4WF53.1 | Q4X1N0.1 | Q4X0B5.1 |
| Q59RL7.1 | P79023.1 | P0CB63.1 | Q5AMJ5.1 | B8NGT5.1 | Q4WZ64.1 | Q4WQV2.1 | Q4WYK9.1 |
| G1UB61.1 | Q59LP6.1 | Q59U11.1 | Q5AMF7.1 | B8NM64.1 | Q4WAZ0.1 | Q4WZP2.1 | Q4WY33.1 |
| Q5ABC6.1 | Q5AP87.1 | P83775.1 | Q5ABW2.1 | B8NV37.1 | Q4WR16.1 | Q4WVK2.1 | Q4X1F8.1 |
| A0A1D8PQB9.1 | P22274.1 | Q5APF2.1 | Q5APJ9.1 | B8N151.1 | Q4WLB9.1 | Q4WUA0.1 | Q4WA45.1 |
| P87020.1 | Q5AC48.1 | Q59VP2.1 | Q5AM72.1 | B8NEJ3.1 | Q4WQS0.1 | A4DA84.1 | Q4WKD7.1 |
| P0CY27.1 | Q5AP59.1 | Q5AEE1.1 | Q5ACU3.1 | B8N8M2.1 | Q4WEP7.1 | Q4WJX0.1 | Q4WCH5.1 |
| Q59XX2.1 | Q59MV1.1 | Q5AMR5.1 | Q5A1V3.1 | B8MYV0.1 | E9R9Y3.1 | Q4WP38.1 | Q4WXY3.1 |
| Q59U10.1 | Q5AL27.1 | Q59SU5.1 | Q59RF7.1 | B8N7I7.1 | P41748.1 | Q4X1D7.1 | Q4WPL7.1 |
| Q59RW5.1 | Q5AJD2.1 | Q59VP1.1 | Q5ACN3.1 | B8NJG3.1 | Q4WYG3.1 | Q4W9Z9.1 | Q4X136.1 |
| Q59MQ0.1 | P0CU38.1 | Q5ADQ0.1 | Q5AHE8.1 | B8N8R1.1 | P87184.1 | Q4WE62.1 | Q4WZ44.1 |
| Q5ABU7.1 | Q59QC5.1 | Q5AK59.1 | Q5AHA4.1 | B8NJH2.1 | Q4WBS1.1 | Q4WZL3.1 | Q4WTC7.1 |
| Q9Y7F0.1 | Q5A5N6.1 | Q59RH5.1 | Q5AEG7.1 | B8NQ51.1 | Q70DX9.1 | Q4WB37.1 | Q4WMK2.1 |
| Q5AC08.1 | Q59Q79.1 | Q5ACW8.1 | Q59V01.1 | B8NM63.1 | Q4WG16.1 | Q4W9Z4.1 | Q4WNC9.1 |
| P30575.1 | Q5AH38.1 | Q5AGM0.1 | Q5AK97.1 | B8NM73.1 | Q96X30.1 | Q4WDD0.1 | Q4WY67.1 |
| Q5AAG6.1 | Q5AMN3.1 | Q59VN2.1 | Q5A1B2.1 | B8NYX0.1 | Q4WV19.1 | Q4WKB9.1 | Q4WU12.1 |
| O74189.1 | Q5A1Z5.1 | O94069.1 | Q5AJK6.1 | B8N3P7.1 | Q4WAZ6.1 | Q4WU07.1 | Q4WA61.1 |
| Q59W62.1 | Q5A6K2.1 | P0CY20.1 | Q59L96.1 | B8NJH1.1 | Q4W944.1 | Q4WBL6.1 | Q4WA58.1 |
| P0CY34.1 | Q59L25.1 | Q59XQ1.1 | Q59MD0.1 | B8MXJ7.1 | Q4WTV7.1 | Q4WX13.1 | Q4WA60.1 |
| Q5A1D3.1 | Q5A922.1 | O94048.1 | Q5AG46.1 | B8NJB0.1 | Q4WMJ9.1 | Q4WV71.1 | Q4WX36.1 |
| Q5AJU7.1 | Q5AFG1.1 | Q5ADX2.1 | Q59VW6.1 | B8NPS7.1 | Q4WZ65.1 | Q4X0C2.1 | Q4WA62.1 |
| Q5A4H5.1 | Q5ALR8.1 | P46586.1 | Q5A8I6.1 | B8N7Z8.1 | A0A067Z9B6.1 | Q4WRU4.1 | Q4WA59.1 |
| Q59Y31.1 | Q5AEI2.1 | P83776.1 | Q9UW24.1 | B8NSV5.1 | Q66WM4.1 | Q4WGS4.1 | Q4WXQ7.1 |
| P0CY29.1 | Q5AI71.1 | Q5A895.1 | Q59Q38.1 | B8MZA3.1 | Q6T267.1 | Q4WP13.1 | Q4WVA0.1 |
| Q5ANJ4.1 | Q5A3A6.1 | Q59PP0.1 | Q5ADL0.1 | B8NLY9.1 | Q4WLW5.1 | Q4WHG5.1 | Q4WDN4.1 |
| Q59NH8.1 | Q5A3X0.1 | Q5AHH4.1 | Q5AH11.1 | B8NR69.1 | Q4WMJ0.1 | Q4WPF7.1 | Q4WK03.1 |
| P0CY33.1 | Q5A4N0.1 | Q96UX5.1 | Q59W55.1 | B8MZ41.1 | Q4WQU0.1 | Q4WH83.1 | Q4WCG2.1 |
| Q00310.1 | Q59TN9.1 | P87206.1 | Q5AC37.1 | B8N7S7.1 | Q4WMJ8.1 | Q4WXW1.1 | Q4WX99.1 |
| Q5A0W9.1 | Q5A5S7.1 | Q5A029.1 | Q5A7Q3.1 | B8NR71.1 | Q4WWN8.1 | Q8NJM2.1 | Q4WV10.1 |
| Q5A4M8.1 | Q59UG3.1 | Q5A1E0.1 | Q59PV6.1 | A0A0D9MRV9.1 | Q4WZ63.1 | Q4WWD3.1 | Q4WIS6.1 |
| Q5AJC0.1 | P0C075.1 | Q59XL0.1 | P0CH96.1 | P55790.1 | Q4WVN4.1 | Q4WPU8.1 | Q4WP65.1 |
| Q59SU1.1 | Q59R09.1 | Q5A6U1.1 | P83782.1 | B8NM72.1 | Q4WAY8.1 | Q4WN99.1 | Q4WUK1.1 |
| Q5AG71.1 | Q9B8D4.1 | Q5A8I8.1 | Q5A660.1 | B8MW78.1 | Q4WY07.1 | P0C959.1 | Q4WKN3.1 |
| Q5AMT2.1 | Q9B8D3.1 | Q59PR9.1 | Q59YT1.1 | Q9P900.1 | Q4WZ66.1 | Q4X0S7.1 | Q4WG58.1 |
| Q59KY8.1 | Q9B8D5.1 | O74261.1 | P53709.1 | B8NDE2.1 | Q4WQZ5.1 | Q4WPW2.1 | Q4WXX9.1 |
| Q59LY1.1 | Q59LR2.1 | Q96VB9.1 | Q5ACX1.1 | B8NJF4.1 | O42630.1 | Q4X1U0.1 | Q4WC37.1 |
| Q59UT4.1 | Q5AED9.1 | Q5AQ47.1 | Q5ADP9.1 | B8NIV9.1 | P0C7S9.1 | Q4WP57.1 | Q4X1Y0.1 |
| Q5ABC5.1 | Q5A4W8.1 | Q5A985.1 | Q92210.1 | B8NG16.1 | Q4WI46.1 | Q4WPH9.1 | Q4WZL8.1 |
| Q59MV9.1 | Q5ANH2.1 | Q59ZW2.1 | Q59MA3.1 | B8NX60.1 | Q4WQY4.1 | Q4WDK5.1 | Q4WR80.1 |
| Q59MD2.1 | Q5A649.1 | P83784.1 | Q5AFK3.1 | B8NM75.1 | Q4WAY3.1 | Q4WI71.1 | Q4WY53.1 |
| Q5A8N2.1 | Q5AI22.1 | Q59P11.1 | Q59S63.1 | B8MZZ6.1 | Q4WT66.1 | Q4WYS7.1 | Q4WL88.1 |
| P40953.1 | Q5A950.1 | Q5ADN8.1 | Q5A0Y2.1 | B8NM67.1 | Q6MY57.1 | Q4WY08.1 | Q4WGV9.1 |
| Q5APR8.1 | Q5ANC9.1 | Q5A849.1 | Q5ALW7.1 | B8NRX2.1 | P0C954.1 | Q4WND3.1 | Q4WC29.1 |
| P10613.1 | Q59UH7.1 | Q5A7R7.1 | Q59W52.1 | B8NXJ2.1 | Q4W946.1 | Q4X1D2.1 | Q4WKV8.1 |
| Q5A5Q6.1 | Q5ALX8.1 | Q59XB0.1 | Q59S42.1 | B8NMD3.1 | Q4WMJ5.1 | Q6MY91.1 | Q4WYA5.1 |
| Q5A4F3.1 | Q5AI37.1 | Q59P96.1 | Q5A961.1 | B8NBI2.1 | Q70GH4.1 | Q4WRV2.1 | Q4WCM6.1 |
| P43094.1 | Q5ABV4.1 | Q59SR6.1 | Q59ST6.1 | B8NPA4.1 | Q4WUL6.1 | Q4WRX4.1 | Q4WKB2.1 |
| Q9P940.1 | Q5AKU4.1 | Q9P975.1 | Q59N74.1 | B8N803.1 | P61832.1 | Q4WP03.1 | Q4WNG7.1 |
| Q5AJY5.1 | Q59VY1.1 | O94083.1 | Q5A6P6.1 | B8NPT0.1 | Q4WG11.1 | Q4WTA6.1 | Q4WRE8.1 |
| P39827.1 | Q59Z51.1 | Q5AIA4.1 | Q59XM0.1 | B8MXP5.1 | Q4WYU4.1 | Q4WZJ0.1 | Q9P8P4.1 |
| Q59WF4.1 | Q59LV8.1 | Q59YF4.1 | Q5A4N5.1 | B8NIB8.1 | Q4WYR6.1 | Q4W9S8.1 | Q4WJS4.1 |
| P83774.1 | Q59X11.1 | Q59XW9.1 | Q5A6M2.1 | B8N9H4.1 | Q4WNE1.1 | Q4X054.1 | Q4WHW1.1 |
| Q59Q46.1 | Q5ABQ7.1 | Q59WU8.1 | Q5A5M7.1 | B8NNK9.1 | Q4WQZ6.1 | Q4X1I3.1 | Q4WYG7.1 |
| Q59X23.1 | Q59PZ3.1 | Q5AAR0.1 | Q5A6N8.1 | B8NI03.1 | Q4WWC6.1 | Q4W9V1.1 | Q4WJH4.1 |
| P46614.1 | O13332.1 | Q5AQ62.1 | Q9UVJ4.1 | B8NM76.1 | Q6Q487.1 | Q4WDF1.1 | Q4WJM6.1 |
| Q5AQ33.1 | Q5AHD6.1 | Q59R35.1 | Q59V88.1 | B8NM79.1 | P0C957.1 | Q4WWN2.1 | Q4WMB6.1 |
| P82610.1 | A0A1D8PPG4.1 | Q5A847.1 | Q59RA0.1 | B8NJG9.1 | Q4WM08.1 | Q4WTH0.1 | Q4WMU9.1 |
| Q5AP80.1 | Q5ADW3.1 | Q5A6A4.1 | Q59XU5.1 | B8NPL7.1 | Q4W9B8.1 | Q4WJQ1.1 | Q4WIF3.1 |
| P46598.1 | Q5AML6.1 | Q5A4Q1.1 | Q5AH12.1 | B8NMR5.1 | Q4WWJ1.1 | Q4WKL7.1 | Q4WEH7.1 |
| Q5A506.1 | Q5A846.1 | P0CY22.1 | Q59ZX3.1 | B8NP65.1 | E9RCR4.1 | Q4WX90.1 | Q4WT34.1 |
| Q5A599.1 | A0A1D8PPI5.1 | P42800.1 | Q5AB48.1 | B8N5S6.1 | Q4WM67.1 | Q4WG69.1 | Q4WT99.1 |
| Q59NP5.1 | P0CT51.1 | Q59KI4.1 | Q5A3Q0.1 | B8NJ86.1 | Q4WUN7.1 | Q4WM32.1 | Q4X0N1.1 |
| Q5AHA0.1 | Q59MA6.1 | Q59JU3.1 | Q5A6M0.1 | P41747.1 | E9QRF2.1 | Q4W1I3.1 | Q4WSA8.1 |
| Q07730.1 | Q5ALW2.1 | P83777.1 | Q5AL29.1 | P41765.1 | Q4WK60.1 | Q4WHX4.1 | Q4WLD1.1 |
| Q5AD05.1 | Q5ABU8.1 | Q5A310.1 | Q59KG2.1 | B8N6V7.1 | Q4WZ61.1 | Q4WXE9.1 | Q4WMU5.1 |
| Q5AME2.1 | Q5AEC6.1 | Q59N80.1 | O42825.1 | B8NKE9.1 | Q4W945.1 | Q4X0X6.1 | O13410.1 |
| P41797.1 | Q5A4X0.1 | Q5AJ77.1 | O59931.1 | B8NGU6.1 | Q4WMA6.1 | Q4W8Z9.1 | Q4WG40.1 |
| P0CY24.1 | Q59LX9.1 | Q59ZV4.1 | Q5AM44.1 | B8NBP9.1 | Q4WNS8.1 | Q4WEB4.1 | Q4WLD5.1 |
| Q5ACZ2.1 | Q59PE7.1 | Q59XA7.1 | Q59RP7.1 | B8N8R2.1 | Q4WDE9.1 | Q4WDH3.1 | Q4WLD4.1 |
| Q5ABE2.1 | Q5ACL9.1 | Q59L13.1 | Q5AK94.1 | B8NKI4.1 | Q4WUR1.1 | Q4X1N4.1 | Q4WLD2.1 |
| Q59M56.1 | Q5ABT8.1 | Q5AG97.1 | Q5AKB1.1 | B8NQQ7.1 | Q4WQ08.1 | Q4WMP0.1 | Q4WLC9.1 |
| Q5AK51.1 | Q5AMH3.1 | Q5AB15.1 | Q59VM4.1 | B8NJH0.1 | Q4WF61.1 | A4D9B6.1 | Q4WQ54.1 |
| Q59UT5.1 | Q5AEF0.1 | Q59S66.1 | Q5A246.1 | B8NKB9.1 | Q7LKT3.1 | Q4WD45.1 | Q4WAZ8.1 |
| Q5AAF4.1 | Q5AJC1.1 | Q59KN8.1 | Q5AJ92.1 | B8NM78.1 | Q4WQZ3.1 | Q4WM95.1 | Q4X161.1 |
| G1UBC2.1 | Q59VP0.1 | Q5A8X9.1 | Q5A2V2.1 | B8NTP7.1 | Q4WAZ3.1 | Q4X0I8.1 | Q4WB00.1 |
| Q5ADT1.1 | Q5AGC7.1 | Q5AFP8.1 | Q5ABP8.1 | B8MWJ5.1 | Q4WNV0.1 | Q4WLV6.1 | Q4WQ14.1 |
| O59923.1 | Q5AQ12.1 | Q9P8W1.1 | Q5AAV3.1 | B8N7G5.1 | Q4WRZ5.1 | Q4W9R2.1 | Q4WP12.1 |
| Q5AL03.1 | Q59X94.1 | Q9P8W0.1 | Q59SN0.1 | B8NER4.1 | Q4WPF2.1 | Q4WAW8.1 | Q4WCR3.1 |
| Q5A2Z7.1 | Q5AFX2.1 | Q9P4E7.1 | Q5ACU6.1 | B8NJH3.1 | Q8TFZ1.1 | Q4WMS0.1 | Q4WAQ9.1 |
| Q59VH7.1 | Q5A1E3.1 | Q9P8V9.1 | Q9Y7C4.1 | B8NDL1.1 | Q4WB03.1 | Q4WAW5.1 | Q6MYX6.1 |
| Q59KZ1.1 | O43101.1 | Q5A7Q6.1 | Q9HFQ7.1 | B8NWY6.1 | P40292.1 | Q4WAX0.1 | Q4WZJ6.1 |
| Q5A960.1 | Q59WU0.1 | Q5A6N1.1 | Q5A3J1.1 | B8NC58.1 | Q4WPN0.1 | Q4WTQ4.1 | Q4WP59.1 |
| Q5AFA2.1 | Q5A893.1 | Q5AI58.1 | P40910.1 | B8NIM4.1 | Q4X1D4.1 | Q4WJ80.1 | Q4WLC8.1 |
| Q5A5U4.1 | P43069.1 | Q9P4E5.1 | Q5AQ57.1 | B8NXI4.1 | Q4WBW4.1 | Q4WD43.1 | Q4WVM1.1 |
| Q5AQ36.1 | Q59LN9.1 | P0CH67.1 | Q5ACL4.1 | B8NJG5.1 | Q4X180.1 | Q4WD44.1 | Q4WLP9.1 |
| Q9URB4.1 | Q5AA40.1 | Q5A387.1 | Q5A449.1 | B8NYD8.1 | Q4WQZ4.1 | Q4WD46.1 | Q4WHD2.1 |
| Q5AL36.1 | Q59S45.1 | Q59NB8.1 | Q59S27.1 | B8NYX1.1 | Q4WZ69.1 | Q4WD48.1 | Q4W9T6.1 |
| P86029.1 | Q5AM60.1 | Q92209.1 | Q59VF9.1 | B8NX76.1 | Q4WFK4.1 | Q4WD42.1 | Q4WR79.1 |
| O13289.1 | Q5AD67.1 | Q5A7M3.1 | Q5A7S5.1 | B8NL00.1 | Q4WUE0.1 | Q4WAX1.1 | Q4WHF8.1 |
| P43063.1 | Q59LV5.1 | Q59QC4.1 | O42817.1 | B8NSP6.1 | Q4WHP6.1 | Q4WY16.1 | Q4WV23.1 |
| Q5A651.1 | Q5AG86.1 | Q59PT4.1 | Q5AJ85.1 | B8N2I5.1 | Q4WWC5.1 | Q4WMJ1.1 | Q4WYA1.1 |
| Q59YH3.1 | Q59ST8.1 | Q5AKW3.1 | Q59P44.1 | B8NP78.1 | Q4WTN9.1 | Q4WBL2.1 | Q6MY48.1 |
| P82612.1 | O93803.1 | Q9P4E8.1 | Q59KC4.1 | B8NE46.1 | Q4WR17.1 | Q4WIQ0.1 | Q9UUZ6.1 |
| P53705.1 | Q5AFT3.1 | Q9P4E6.1 | Q59XV0.1 | B8NMK3.1 | Q4WA15.1 | Q4WID9.1 | Q4WRH5.1 |
| Q5AMQ6.1 | Q5A519.1 | Q59MJ2.1 | Q5ABV6.1 | B8NG97.1 | Q4WZ11.1 | Q4WPG0.1 | Q4WEU2.1 |
| Q9Y7W4.1 | O74161.1 | Q59LL4.1 | Q59UH5.1 | B8N316.1 | E9RD40.1 | Q4WDM5.1 | Q8NKF4.1 |
| Q5A688.1 | Q59RN6.1 | Q59S43.1 | Q5A869.1 | B8NYW9.1 | A4DA85.1 | Q4WYV0.1 | Q9HGV0.1 |
| P25997.1 | Q5A3Z5.1 | Q59P87.1 | Q5AEF2.1 | B8NBJ4.1 | P54267.1 | Q4WEY4.1 | Q4X156.1 |
| Q5AHG6.1 | P31225.1 | Q5AEN6.1 | Q5A0W7.1 | B8N7E5.1 | P0C958.1 | Q4WN24.1 | Q4WXZ5.1 |
| Q8TGH6.1 | Q59QC6.1 | Q59LF9.1 | P83783.1 | B8NM69.1 | Q4WQZ7.1 | Q4WQ21.1 | Q4X1R1.1 |
| Q5ABD0.1 | Q9I589.1 | Q5ADX5.1 | Q59XP0.1 | B8N306.1 | Q9Y8D9.1 | Q4WNN2.1 | Q4WXX4.1 |
| Q5AL16.1 | Q5A8W9.1 | P83778.1 | Q5AP66.1 | B8N7Z0.1 | Q4WBR2.1 | Q4WAH2.1 | Q4WJE9.1 |
| Q59RR0.1 | Q5APG6.1 | Q5AG31.1 | Q5AGZ9.1 | B8NJB2.1 | Q4WL66.1 | Q4WT40.1 | P41746.1 |
| Q59KM8.1 | Q59YD9.1 | Q5AHZ7.1 | Q5AFE4.1 | B8NWE1.1 | Q4WVG8.1 | Q4WFT3.1 | Q4WDF7.1 |
| Q5A220.1 | Q5AEN1.1 | Q5ACU4.1 | Q59PE4.1 | B8NIM7.1 | Q4WZ68.1 | Q4WQM4.1 | Q4X014.1 |
| Q92206.1 | Q8X1E6.1 | Q59PD6.1 | Q59LF3.1 | B8NKA3.1 | Q8TGG8.1 | Q4X0W8.1 | Q4WNX1.1 |
| Q59Z29.1 | P56553.1 | Q5A940.1 | Q9P8E3.1 | B8NK45.1 | Q4X0A9.1 | Q873N1.1 | Q4WTM9.1 |
| Q5AK66.1 | Q59WI7.1 | Q59M70.1 | Q59S78.1 | B8NBX4.1 | Q4WHG1.1 | Q4WR23.1 | Q4WQM6.1 |
| P46273.1 | Q5ALY0.1 | Q5A917.1 | Q59L89.1 | B8NVK8.1 | Q4WVE3.1 | Q4WEI5.1 | Q4WV66.1 |
| Q5AFI4.1 | Q5A0A9.1 | Q5ANA8.1 | P46250.1 | B8NI10.1 | Q4X162.1 | Q4WE68.1 | Q4WKH9.1 |
| Q5ALV2.1 | Q5A884.1 | Q5A3M6.1 | Q5AQ76.1 | B8NSW2.1 | Q6A3P9.1 | Q4WR21.1 | Q4WI01.1 |
| Q5A312.1 | Q9B8D8.1 | Q59MC8.1 | Q5AI21.1 | B8NA06.1 | Q4WQI1.1 | Q4WTC4.1 | Q873W8.1 |
| Q5A3V6.1 | Q59PZ7.1 | Q5A3K2.1 | Q96W54.1 | B8NLL0.1 | O43102.1 | Q4WPV8.1 | Q4WPW8.1 |
| Q59TB2.1 | Q9B1P9.1 | Q5A644.1 | P0CU35.1 | B8NBB2.1 | Q7Z8P9.1 | Q4WYF1.1 | Q4X1W8.1 |
| Q59KI0.1 | Q59MA9.1 | Q59ZH9.1 | O94150.1 | B8NBM3.1 | Q4WAY4.1 | Q4WJM7.1 | Q4WV30.1 |
| Q5APU2.1 | Q5ACH7.1 | Q71U11.1 | Q5ADT9.1 | B8NA66.1 | Q4X1Q4.1 | Q4WHP5.1 | Q4WUG9.1 |
| O42766.1 | P0C8K9.1 | Q5AJF1.1 | Q5A0L9.1 | B8NUL8.1 | Q4WJ90.1 | Q4WHU1.1 | Q4WYF4.1 |
| Q5A446.1 | Q59MF9.1 | Q59YV0.1 | Q5ACV9.1 | B8N076.1 | Q4X117.1 | Q4WT68.1 | Q4WK80.1 |
| Q59UY7.1 | Q5AI44.1 | Q59S85.1 | Q5A1D5.1 | B8NVB7.1 | Q4WBU0.1 | Q4U3Y2.1 | Q4WGU1.1 |
| Q5A6T5.1 | Q5AL10.1 | Q59PP6.1 | Q5A744.1 | B8NBC2.1 | Q4X228.1 | Q4WSM6.1 | Q4WYK1.1 |
| G1UB63.1 | Q5AED6.1 | Q59X40.1 | Q5A455.1 | B8NJL4.1 | Q6MYX3.1 | Q4W9B9.1 | Q4WNC1.1 |
| Q59QC7.1 | Q5AGE5.1 | O94030.1 | Q5AAU3.1 | B8NR70.1 | Q4X084.1 | Q4WHB7.1 | Q4WQC5.1 |
| P34948.1 | Q59LQ5.1 | Q5AL63.1 | Q9C0L9.1 | B8NGP8.1 | Q4X251.1 | Q4WNA1.1 | Q4WJS7.1 |
| P46592.1 | P0C8L0.1 | Q5A0Y8.1 | Q5AFV3.1 | B8NXS9.1 | Q4WHZ9.1 | Q4WHH4.1 | Q4WHK3.1 |
| Q5A872.1 | Q5A301.1 | Q5A723.1 | Q5A360.1 | B8NDZ1.1 | Q4WLA7.1 | Q4WA21.1 | Q4X0M4.1 |
| Q59QW5.1 | Q59X26.1 | Q5A1A0.1 | Q5AI90.1 | B8NW70.1 | Q4WXH8.1 | Q4WCP8.1 | Q4WLI5.1 |
| Q59WH0.1 | Q5AML2.1 | Q5A4G2.1 | Q5AD73.1 | B8MW97.1 | Q4WAS9.1 | Q4WVH0.1 | Q4WP54.1 |
| Q5A1N6.1 | Q59W50.1 | Q5A970.1 | Q5AD77.1 | B8N9M2.1 | Q4WZ60.1 | Q4WUJ6.1 | Q4WNH8.1 |
| Q5AAJ8.1 | Q59ZG8.1 | Q59Y46.1 | P87219.1 | B8N195.1 | Q4WYG2.1 | Q4WWP1.1 | Q4WTT2.1 |
| Q5AG40.1 | Q59VC6.1 | Q5AHC2.1 | Q59QH6.1 | B8MYS5.1 | A4D9R3.1 | Q4WS57.1 | Q4WEL6.1 |
| Q59P39.1 | Q59ZY9.1 | Q59V93.1 | Q59PT6.1 | B8NNI2.1 | Q4WR20.1 | Q4WVD9.1 | Q4WI38.1 |
| Q5AJB1.1 | Q5AL13.1 | Q59SI5.1 | Q5A5N5.1 | B8NJZ7.1 | Q4WA22.1 | Q4WK77.1 | Q4WTT7.1 |
| Q59UP6.1 | Q59NY7.1 | Q59RR3.1 | Q5ADL4.1 | B8N6H2.1 | Q4WM60.1 | Q4WCL2.1 | Q4WWS3.1 |
| Q5AMH6.1 | Q5AP89.1 | Q5APQ8.1 | Q5AM84.1 | B8NIX4.1 | Q0H904.1 | Q4WN75.1 | Q4WVH3.1 |
| Q59SF7.1 | Q59XY0.1 | P87207.1 | Q5AK73.1 | B8NGC8.1 | P78574.1 | Q4WES5.1 | Q4WD95.1 |
| Q59VX8.1 | Q5ADL9.1 | Q59MZ9.1 | Q5A4H9.1 | B8N970.1 | Q4WAR8.1 | Q4WVT3.1 | Q4WLP1.1 |
| Q59WG7.1 | P53698.1 | Q59Y41.1 | Q5ALX5.1 | B8MY73.1 | Q4WNK7.1 | Q4WVV6.1 | Q4WQI6.1 |
| Q5AFN8.1 | Q5AJX2.1 | Q59S52.1 | Q5A748.1 | B8N6W5.1 | P78746.1 | Q4WP83.1 | Q4WCJ7.1 |
| Q59TP1.1 | Q5APS5.1 | Q59U73.1 | Q5ALU2.1 | B8N3L3.1 | Q4WPF8.1 | Q4WAY7.1 | Q4WTT8.1 |
| Q5AF39.1 | Q59PG6.1 | Q9Y872.1 | Q5A2B9.1 | B8NPS8.1 | Q4WX43.1 | Q4WX89.1 | Q4WWR2.1 |
| Q5AP97.1 | Q59NP1.1 | Q5AGA9.1 | Q5ALX3.1 | B8NTI4.1 | Q4WQL4.1 | Q4WYT0.1 | Q4WWL0.1 |
| Q5A5U9.1 | Q59PD3.1 | Q59VL7.1 | Q5A1M3.1 | B8MYS7.1 | Q4WBE1.1 | Q4WNT9.1 | Q4WZT9.1 |
| Q5AF41.1 | Q5ACW2.1 | Q59KJ7.1 | Q5A4H4.1 | B8NM70.1 | Q4WQT2.1 | Q4WVS4.1 | Q4X0I7.1 |
| O13318.1 | Q5ANB2.1 | Q5AP90.1 | Q5AA26.1 | B8MYS8.1 | Q4WBT5.1 | A4D9J5.1 | Q4WU00.1 |
| Q5AA09.1 | Q5AJD0.1 | Q5AD72.1 | Q5ANL6.1 | B8N6M6.1 | Q4WQZ2.1 | Q4W9B7.1 | Q4WRW0.1 |
| Q5A762.1 | Q5A4P9.1 | Q59S59.1 | P87218.1 | B8NCU7.1 | Q4WD47.1 | Q4WNC6.1 | Q4W9V0.1 |
| P46587.1 | P78599.1 | Q5APM7.1 | Q59KF3.1 | B8N5T6.1 | Q4WCZ8.1 | Q4WJW8.1 | Q4WYJ7.1 |
| Q5A287.1 | Q5APC8.1 | Q5A2Z1.1 | Q59N29.1 | B8MVS3.1 | Q4WB01.1 | Q4WH96.1 | Q4WHY5.1 |
| Q59X49.1 | Q59LU0.1 | Q59TD3.1 | Q5A0L7.1 | B8NCM8.1 | Q4WBK6.1 | Q4X0I5.1 | Q4WEP0.1 |
| Q5ADM9.1 | Q5APT8.1 | P84149.1 | Q59UG4.1 | B8NW36.1 | Q4WRQ7.1 | Q4WMS9.1 | Q4WXD3.1 |
| Q5AH02.1 | Q59PR3.1 | Q5AI97.1 | Q5AHK2.1 | B8NJG7.1 | Q4WTQ6.1 | Q4WAH4.1 | Q4WJ02.1 |
| Q5A4X5.1 | Q5A2W2.1 | Q5A2A2.1 | Q5ADP6.1 | B8N7Z6.1 | Q4WJ21.1 | Q4WII3.1 | Q4WP96.1 |
| Q5A4E3.1 | Q5A4E2.1 | Q5A044.1 | Q5AK62.1 | B8NGU1.1 | Q4WPQ8.1 | Q4WJA1.1 | Q4WN54.1 |
| Q5A761.1 | Q5A309.1 | Q59P03.1 | Q59YF0.1 | B8NC10.1 | Q4WR62.1 | Q4W9R7.1 | Q4WCW2.1 |
| Q9UW23.1 | A0A1D8PL26.1 | Q59TU0.1 | Q5AAJ7.1 | B8N4P0.1 | Q4WD56.1 | Q4WPP2.1 | Q4WPM6.1 |
| P53704.1 | P0CU37.1 | Q5APK7.1 | Q5A8H7.1 | B8NPN0.1 | Q4WIN6.1 | Q4WWQ6.1 | Q4WNW3.1 |
| Q59VR1.1 | Q5AF95.1 | Q59ST1.1 | Q59U81.1 | B8NQ08.1 | Q4U3E8.1 | Q4WNI0.1 | Q4WSI0.1 |
| G1UB67.1 | Q59MW2.1 | Q5A7N3.1 | Q5APB6.1 | B8N3N5.1 | Q4X195.1 | Q4WDG1.1 | Q4WNY4.1 |
| P52496.1 | Q59S50.1 | Q5ANP2.1 | Q59WD5.1 | Q00049.1 | P0C955.1 | Q4X0Z7.1 | Q4WVF4.1 |
| Q9HEW1.1 | Q5AD78.1 | O59933.1 | Q5ABA2.1 | B8NDP1.1 | Q4WRH9.1 | Q4WMS3.1 | Q4WP02.1 |
| Q5A6B6.1 | Q5AMM4.1 | Q3MPQ4.1 | Q5A861.1 | B8NEM4.1 | Q4WVD1.1 | Q4WN42.1 | Q4WWH6.1 |
| Q5A1W9.1 | Q5AAW3.1 | Q59MP1.1 | Q5AH87.1 | Q9P8Z9.1 | Q4WID6.1 | Q4WJH6.1 | Q4WVE5.1 |
| P30418.1 | Q59MG1.1 | Q59MB6.1 | P33181.1 | B8MZJ8.1 | Q4WFX9.1 | Q4WYS1.1 | Q4WHP3.1 |
| Q59SN6.1 | Q5ACK7.1 | Q5A216.1 | Q59Q43.1 | B8NX10.1 | Q4WRE4.1 | Q4WJ01.1 | Q4WRE2.1 |
| Q5A343.1 | Q5A218.1 | Q9UVL1.1 | Q5A860.1 | B8NV05.1 | Q4WC60.1 | Q4WGL2.1 | Q4WYX0.1 |
| Q5ABZ2.1 | Q59SJ9.1 | Q59YS7.1 | Q59ZW9.1 | B8NEI6.1 | Q4WR18.1 | Q4WP49.1 | Q4WRB8.1 |
| Q59MJ1.1 | Q5AD49.1 | Q5AGA0.1 | A0A1D8PI78.1 | B8MZI5.1 | Q4WQY6.1 | Q4WPE6.1 | Q4WI88.1 |
| Q5AJ71.1 | Q59NX9.1 | Q5A687.1 | Q59R24.1 | B8NSJ0.1 | Q4WXK4.1 | Q4WWW9.1 | Q4WQL0.1 |
| Q74201.1 | Q5A119.1 | Q59R28.1 | Q5AHJ5.1 | B8NDR8.1 | Q4WI96.1 | Q4WKB5.1 | Q4WDZ0.1 |
| Q5AK54.1 | Q59K07.1 | Q5AJS6.1 | P0C0X3.1 | B8NDQ2.1 | Q4WVH4.1 | Q4WA38.1 | Q4WA70.1 |
| O93852.1 | Q5AKA5.1 | Q5AD59.1 | Q59KL6.1 | B8B9M0.1 | A4D9R2.1 | Q4WHL1.1 | Q4WQ82.1 |
| Q5AIR7.1 | Q59QC2.1 | Q5AG73.1 | P43072.1 | B8NLN6.1 | P0C956.1 | Q4X1X0.1 | Q4WMX7.1 |
| Q5A8K2.1 | Q5AL45.1 | Q5AND1.1 | Q5AF54.1 | B8N9X2.1 | Q4WR22.1 | Q4WRX2.1 | Q4X0V2.1 |
| Q8TGB2.1 | P0CY19.1 | Q59NG5.1 | Q59W44.1 | B8NM08.1 | Q4WQY8.1 | Q4WDH9.1 | Q4WI16.1 |
| Q5A477.1 | Q5AGC4.1 | Q59N20.1 | P48990.1 | B8NSD4.1 | Q4WJJ3.1 | Q4WMG1.1 | Q4WXA1.1 |
| Q5AP95.1 | Q5ALP1.1 | Q59WJ5.1 | Q59U67.1 | B8N122.1 | Q4X265.1 | Q4WDE0.1 | Q4WCV5.1 |
| Q5AF03.1 | Q5AK42.1 | Q5AA50.1 | Q5ANB7.1 | B8NCF0.1 | Q9UVX3.1 | Q4WCX4.1 | Q4W9M7.1 |
| Q5AMQ4.1 | Q5APG7.1 | Q5A319.1 | Q5A3Y5.1 | B8NKS1.1 | Q4WR19.1 | Q4X122.1 | Q4WQY9.1 |
| Q5ANI6.1 | Q59Y20.1 | Q5AD27.1 | Q59SI2.1 | B8N3R8.1 | Q4WTF3.1 | Q4WZF1.1 | Q4WX30.1 |
| P78595.1 | Q5ALL3.1 | Q5AHI7.1 | Q5APA2.1 | B8NG55.1 | Q4WLY1.1 | Q4WMU1.1 | Q4WUT7.1 |
| Q874I4.1 | Q5AAT0.1 | Q5ANE3.1 | P12461.1 | B8N0Q7.1 | Q4WMU3.1 | Q4WGB7.1 | Q4WIQ2.1 |
| Q9UWF6.1 | Q59QD6.1 | Q59S06.1 | Q591N1.1 | B8N513.1 | Q4WQG5.1 | A4DA73.1 | Q4X022.1 |
| Q9UW12.1 | Q5AML1.1 | P87185.1 | Q5A416.1 | B8N4F5.1 | Q4WPE9.1 | Q4WD81.1 | Q4WQZ0.1 |
| Q5AAL9.1 | Q5ACM9.1 | Q5AM50.1 | O43133.1 | B8NT06.1 | Q4WAZ4.1 | Q4WHG0.1 | Q4WE58.1 |
| Q5AD56.1 | Q59Z14.1 | Q9B8C8.1 | Q59MI8.1 | B8NHF2.1 | Q4WLN7.1 | Q4WAJ6.1 | Q4WJR4.1 |
| Q5A7S7.1 | Q5AAG1.1 | Q9B8C9.1 | Q5A302.1 | B8MWR8.1 | Q4WRB0.1 | Q4WCL1.1 | Q4WQZ1.1 |
| P28870.1 | Q59YL9.1 | Q9B8D2.1 | Q5AH60.1 | B8N4G0.1 | Q4WC55.1 | Q9HEQ8.1 | Q4WQY7.1 |
| Q59NX5.1 | Q59PL9.1 | Q9B8D1.1 | Q5A692.1 | B8N9M5.1 | Q4WMV5.1 | Q4WEN1.1 | Q4WQY5.1 |
| Q5ABG1.1 | Q59QL0.1 | Q59M69.1 | Q59Q39.1 | Q00278.1 | Q4WAZ2.1 | Q4WI37.1 | Q4WXT2.1 |
| Q5AP52.1 | Q5A1U8.1 | Q59VX9.1 | Q59NW5.1 | B8NPX1.1 | Q92197.1 | Q4WZS1.1 | Q8J130.1 |
| P0CY31.1 | O74198.1 | Q59YD8.1 | Q5A6Q4.1 | B8NYW8.1 | Q4WSE8.1 | Q4WDA4.1 | Q4WJX5.1 |
| P13649.1 | Q5A013.1 | Q59QH0.1 | P43075.1 | B8N219.1 | Q4WX94.1 | Q4WLS7.1 | Q4X1I8.1 |
| Q5AG77.1 | P87163.1 | Q5A8A2.1 | Q59Q36.1 | B8NQK0.1 | Q4WLD0.1 | Q4WWM6.1 | Q4WVW4.1 |
| Q9UW13.1 | Q5AI86.1 | Q9B8D7.1 | Q92410.1 | Q12732.1 | Q4WUK5.1 | Q4WP81.1 | Q4WTH1.1 |
| P0CU34.1 | Q5AM80.1 | Q9UW25.1 | Q5A1M4.1 | Q9HEY7.1 | Q8TGG5.1 | Q6MYT0.1 | Q4WLI9.1 |
| P40954.1 | Q5A6Q7.1 | Q59XY9.1 | Q5ANC8.1 | Q6UEG8.1 | Q4WTK9.1 | Q4WTL0.1 | Q4WQJ5.1 |
| Q04802.1 | Q5AGV4.1 | Q5A2T0.1 | Q5A4K7.1 | O42716.1 | Q4WVU5.1 | Q4WXV2.1 | Q4WQJ2.1 |
| P0CY35.1 | Q5AJ82.1 | Q5AGW8.1 | Q5ADL8.1 | Q9UW95.1 | Q4WLM7.1 | Q4X0Z3.1 | Q4WK56.1 |
| Q5AAU5.1 | Q5AIA1.1 | Q5ADS3.1 | Q59RQ2.1 | Q9Y8D9.1 | Q4W9P4.1 | Q4WN25.1 | Q4WJS2.1 |
| Q59VQ8.1 | Q5A9Z6.1 | Q5ACR4.1 | Q5APC0.1 | A2SZW8.1 | Q4WIT0.1 | Q4WN21.1 | Q4WJT9.1 |
| Q59VF4.1 | Q5AGC1.1 | P0CU36.1 | Q5A931.1 | Q2U2U3.1 | Q4WQB9.1 | Q4X1N0.1 | Q4WUV8.1 |
| Q5A0X8.1 | Q59ZV5.1 | Q5A2Y7.1 | Q59VW7.1 | Q00258.1 | Q4WGK6.1 | Q4WQV2.1 | Q4WX68.1 |
| O13426.1 | Q59VP7.1 | Q5A368.1 | Q5AKU5.1 | Q12437.1 | Q4WMR0.1 | Q4WZP2.1 | Q4WHN8.1 |
| Q5A0M4.1 | Q5A7P3.1 | Q9B8D6.1 | Q59MN0.1 | E9QYP0.1 | Q4WYE5.1 | Q4WVK2.1 | Q4WJU8.1 |
| Q59PF9.1 | Q5A6K8.1 | Q9B8D0.1 | Q59WH7.1 | Q4WS76.1 | Q4WZ01.1 | Q4WUA0.1 | Q4WBT4.1 |
| Q5AFP3.1 | Q5AD13.1 | Q5A2K0.1 | Q96WL3.1 | Q4WMJ7.1 | Q4W930.1 | A4DA84.1 | Q4WZV6.1 |
| Q5AEK8.1 | Q04782.1 | Q5A1Q5.1 | Q59ZX6.1 | P28296.1 | Q4WBR0.1 | Q4WJX0.1 | Q4WUV9.1 |
| Q5AFK0.1 | Q5A0J9.1 | Q5AEM5.1 | Q59MU1.1 | E9RAH5.1 | Q4WHD1.1 | Q4WP38.1 | Q4WLV2.1 |
| Q5APD4.1 | Q59ZZ6.1 | Q5AK25.1 | Q5A0J0.1 | Q4WW81.1 | Q4WTB3.1 | Q4X1D7.1 | Q4WFS2.1 |
| Q5ADQ9.1 | Q5AH25.1 | Q5AK10.1 | Q59WK2.1 | Q50EL0.1 | Q4WRV9.1 | Q4W9Z9.1 | Q4WBM1.1 |
| P83779.1 | Q59XM1.1 | Q5AI15.1 | P43073.1 | Q4WY82.1 | Q4X267.1 | Q4WE62.1 | Q4WAU7.1 |
| Q5AAH2.1 | Q59NN8.1 | Q5AEM8.1 | P87220.1 | Q4WSF6.1 | Q4WVZ3.1 | Q4WZL3.1 | Q4WZS3.1 |
| O74254.1 | Q5AP65.1 | Q5A4J4.1 | Q5ABD9.1 | E9RCK4.1 | Q4WR24.1 | Q4WB37.1 | Q4WPU9.1 |
| Q5AL49.1 | Q5AFF7.1 | Q59YK4.1 | P83781.1 | Q4WZA8.1 | Q4WPM8.1 | Q4W9Z4.1 | Q4WVZ0.1 |
| P53697.1 | Q59VR3.1 | Q59WV0.1 | Q5ANB1.1 | Q4WAW7.1 | Q4WE86.1 | Q4WDD0.1 | Q4WCX9.1 |
| Q5ACL7.1 | Q5AFH3.1 | Q5AHB1.1 | Q5A0E2.1 | Q92405.1 | A4DA70.1 | Q4WKB9.1 | Q4WJ38.1 |
| Q5AEM6.1 | P83780.1 | Q5APK0.1 | Q5AMG5.1 | Q4WRY5.1 | Q4WW45.1 | Q4WU07.1 | Q4WRC2.1 |
| Q81G40.1 | Q5A4G9.1 | Q59PW0.1 | Q5A6T8.1 | Q7Z7W6.1 | Q4WVG2.1 | Q4WBL6.1 | Q4WWW5.1 |
| Q59X38.1 | Q59NQ9.1 | O74711.1 | Q59WG5.1 | Q4WZ67.1 | Q4WQG9.1 | Q4WX13.1 | Q4WC84.1 |
| Q59VQ3.1 | A0A1D8PNP3.1 | Q5ADN9.1 | Q5AI80.1 | Q4WZB3.1 | Q4WQN1.1 | Q4WV71.1 | Q4WTW3.1 |
| Q5A7Q2.1 | Q5A9Z1.1 | Q5ACP5.1 | Q5AB49.1 | Q4WLN1.1 | Q4WCF1.1 | Q4X0C2.1 | Q4WFV6.1 |
| Q5AJV5.1 | A0A1D8PK89.1 | Q5A1E1.1 | Q59R32.1 | Q4WR82.1 | Q4WZC3.1 | Q4WRU4.1 | Q4WKD9.1 |
| Q5A3Z6.1 | Q59WB3.1 | Q59L86.1 | Q5A061.1 | O14434.1 | Q4WYX7.1 | Q4WGS4.1 | Q4WP10.1 |
| Q5A201.1 | Q59ZC8.1 | Q5AD23.1 | Q59P50.1 | Q4WMK0.1 | Q4X0A5.1 | Q4WP13.1 | C5JZM2.1 |
| O93827.1 | Q5A1L6.1 | Q5A5U6.1 | Q59WC6.1 | Q4WPX2.1 | Q4WUD3.1 | Q4WHG5.1 | P0DJ06.1 |
| Q5AAI8.1 | A0A1D8PN14.1 | Q5ADQ7.1 | Q5AI48.1 | O43099.1 | Q4WS49.1 | Q4WPF7.1 | P46598.1 |
| Q5A2J7.1 | Q5A8X7.1 | Q59WJ4.1 | Q59ZU1.1 | Q4WJ81.1 | Q4WCX7.1 | Q4WH83.1 | P87020.1 |
| P22011.1 | Q59X39.1 | Q5AGV7.1 | Q5AG56.1 | P67875.1 | Q4WXX5.1 | Q4WXW1.1 | P38110.1 |
| Q9HGT6.1 | Q5ACW6.1 | Q59NR8.1 | Q59T36.1 | Q4WZB4.1 | Q4WNB5.1 | Q8NJM2.1 | C1GK29.1 |
| Q9UW26.1 | P0CB54.1 | Q5A5K7.1 | Q9P840.1 | E9QUT3.1 | O42799.1 | Q4WWD3.1 | |
| Q59LX5.1 | A0A1D8PN88.1 | Q5A210.1 | Q5AHB8.1 | Q4WAZ9.1 | Q4WHA3.1 | Q4WPU8.1 | |
| Q59P10.1 | A0A1D8PMB1.1 | Q59N10.1 | Q5AKU3.1 | Q4WZ70.1 | Q4W9M3.1 | Q4WN99.1 | |
| Q3MNT0.1 | Q5ABR2.1 | Q5A1B3.1 | Q59ZW4.1 | E9RBR0.1 | Q4WVH5.1 | P0C959.1 | |

### Model Population

[0155] The method may comprise the step of selecting or defining a model human population. A suitable model population is one that is relevant to the human population or a subpopulation in which it is intended to use the peptides designed or prepared by the method to induce a T cell response. This may be referred to as the target population or the intent-to-treat population. The peptides or the encoded peptides designed or produced by the method are for use in a method of inducing a T cell response against the target polypeptide in a subject of the intent-to-treat population. A relevant population is one that is representative or similar to the intent-to-treat population. In some cases the model population is representative for the whole human race. In other cases the model population may be a disease- and/or subject-matched population (subpopulation), for example a subpopulation matched to the intent-to-treat population by ethnicity, geographical location, gender, age, disease or cancer, disease or cancer type or stage, genotype, and/or expression of one or more biomarkers (for example, women having the BRCA mutation for a breast cancer vaccine), and/or partially by HLA genotype (for example subjects have one or more particular HLA alleles). In some cases the intent-to-treat population may be subjects having cancer or a type of cancer, such as any described herein. For example, the model population may have HLA class I and/or class II genomes that are representative of those found in the world population, or a subject and/or disease matched subpopulation. In some cases the model population is representative for at least 70%, or 75% or 80% or 84% or 85% or 86% or 90% or 95% of the intent-to-treat population by HLA diversity and/or HLA frequency. In some cases the model population may comprise at least 100, or 200 or 300 or 400 or 500 or 1000 or 5000 or 10000 or 15000 subjects.

[0156] Each subject in the model population is minimally defined by their HLA class I or class II genotype, e.g. complete 4-digit HLA class I genotype. Data concerning the HLA genotype of the model population may be stored or recorded in or retrieved from a database or be an in silico model human population.

### HLA-Binding Criteria

[0157] The method comprises the step of identifying, for each subject of the model population, amino acid sequences within the target polypeptide that meet certain HLA-binding criteria, such as comprising a T cell epitope that can bind to multiple HLA class I and/or class II HLA molecules as described herein. For example, amino acid sequences that comprise a T cell epitope that is capable of binding to at least three HLA class I alleles of a subject and/or a T cell epitope that is capable of binding to at least three or four HLA class II alleles of the subject are optimal for inducing CD4+ T cell and/or CD8+ T cell responses. In some cases the HLA class I-binding T cell epitope and the HLC class II binding T cell epitope may overlap. In some cases the HLA class I binding T cell epitope may be fully embedded in the sequence of the HLA class II binding T cell epitope. In some cases the multiple HLA class I and class II binding epitopes are within a minimum distance on one another, such as both within a 50, or 45, or 40, or 35, or 30, or 25 amino acid fragment of the target polypeptide.

[0158] The method comprises selecting a polypeptide fragment window length. The polypeptide fragment window length defines the fragment length across the target polypeptide used to identify hotspots where the maximum number of subjects in the model population have an amino acid sequence that meets the HLA-binding criteria. The polypeptide fragment window length may be from 9 to 50 amino acids long.

[0159] Peptides that comprise a hotspot sequence as identified by the method described herein may be particularly useful for inducing T cell responses in a high proportion of the subjects of the intent-to-treat population. Peptides comprising such sequences may accordingly be designed or prepared according to the present disclosure and used in methods of treatment.

[0160] The peptide may consist of the amino acid sequence of the hotspot fragment of the target polypeptide or may comprise the sequence of a longer fragment of the target polypeptide of which the hotpot sequence is a part. In some cases the target polypeptide fragment may be flanked at the N and/or C terminus of the peptide by additional amino acids that are not part of the consecutive sequence of the target polypeptide antigen. In some cases the fragment may be flanked by up to 30 or 25 or 20 or 15 or 10, or 9 or 8 or 7 or 6 or 5 or 4 or 3 or 2 or 1 additional amino acid at the N and/or C terminus.

[0161] In some cases the method of the disclosure may be repeated in an iterative process to identify further fragments of the target polypeptide antigen that meet the HLA-binding criteria in subjects of the model population. In some case the method may be repeated in up to 50, 45, 40, 35, 30, 25, 20, 19, 18, 17, 16, 15, 14, 13, 12, 11, 10, 9, 8, 7, 6, 5, 4, 3, 2 or 1 cycles of the method described herein.

[0162] In some cases, the object of the iterative process may be to identify the minimum number of peptides or hotspots that will induce the desired T cell responses (cytotoxic T cell response and/or helper T cell response) in the maximum number of subjects in the model or intent-to-treat population. In this case it is desirable to remove from the model population those subjects for whom the hotspots or peptides selected in any previous rounds already meet the desired criteria before repeating the method in a further cycle. The iterative method may in some cases be continued until either no more sequences meeting the HLA-binding criteria can be identified or a pre-defined number of cycles, number of hotspots, or pre-defined minimal coverage of the model or intent-to-treat population is reached.

[0163] In some cases further predefined criteria may be applied to the hotspot selection process. If a particular hotspot sequence does not meet such additional criteria then the hotspot may be disregarded and another amino acid sequence of the selected window length and meeting the HLA-binding criteria for the next highest number of subjects in the model population may be selected, until a sequence is reached that meets the additional predefined criteria. In an iterative process, the subjects of the model population for which the selected sequence meets all of the HLA-binding criteria and other criteria should be removed from the model population before proceeding to the next cycle.

[0164] In one example, the additional predefined criteria may relate to features of the peptide sequence that influence manufacturing feasibility. For example, in some cases a peptide/hotspot sequence may be rejected in it comprises a particular amino acid residue, such as a cysteine, or a particular amino acid motif, or if the peptide/hotspot sequence has less than a minimum level of hydrophilicity.

[0165] The method of the disclosure may be used to provide peptides that are useful for inducing T cell responses against a given polypeptide, or to provide an ideal set of peptides from which to select a peptide for inducing T cell responses against one or more given polypeptides in a specific subject of a given human population.

[0166] In other cases the method may be repeated for a set of polypeptides, for example a set of polypeptides that are associated with the same disease or condition, such as polypeptides that are expressed by the same pathogen or type of pathogen, or associated with the same cancer or type of cancer, such as those disclosed herein. The method may then provide an ideal set of peptides from which to select peptides to treat the disease or condition in a specific subject of a given human population.

### Panels of Peptides

[0167] In some cases the disclosure provides a panel of peptides or a panel of polynucleic acids or vectors encoding a panel of peptides. The panel may be suitable for use in a method of inducing a T cell response against one or more target polypeptides in a subject of an intent-to-treat human population. The intent-to-treat human population may be a population as described herein and may be defined by the HLA genotype distribution in the subjects of the intent-to-treat population as described herein.

[0168] In some cases the panel is a panel designed and/or prepared according to the methods described herein. In other cases the panel comprises or encodes two or more peptides designed and/or prepared according to the method described herein.

[0169] In other cases the panel comprises or encodes two or more peptides, wherein each peptide comprises a fragment of the one or more target polypeptide, wherein the fragment comprises, in a high proportion of the intent-to-treat population, a sequence that meets any of the HLA-binding criteria described herein. In some cases a “high” percentage may be at least or more than 1%, 2%, 5%, 10%, 12%, 15%, 16%, 17%, 18%, 19%, 20%, 21%, 22%, 23%, 24%, 25%, 26%, 27%, 28%, 29%, 30%, 31%, 32%, 33%, 34%, 35%, 36%, 37%, 38%, 39%, 40%, 41%, 42%, 43%, 44%, 45%, 46%, 47%, 48%, 49% or 50% of an intent-to-treat population as described herein.

[0170] The peptides of the panel may have any of the characteristics of a peptide described herein. For example, each peptide may be 9-50 amino acids in length; may comprise a fragment of the one or more target polypeptides that is 9-50 amino acids in length and meets the HLA-binding requirements; the target polypeptide fragment may be flanked at the N and/or C terminus of the peptide by additional amino acids that are not part of the consecutive sequence of the target polypeptide antigen; and/or the target polypeptide(s) may be any described herein, for example any of those listed in Tables 2 to 5.

[0171] In some cases the target polypeptide of each peptide of the panel may be the same; i.e each peptide comprises a different fragment of the target polypeptide, each of which meets the HLA-binding requirements in a high proportion of the intent-to-treat population. The panel then represents a selection of peptides that may be used to induce T cell responses against the same target polypeptide in different HLA-matched subjects. In some cases the fragments of the target polypeptide in the peptides of the panel do not overlap or do not comprise any common T cell epitopes or PEPIs.

[0172] In other cases the panel may comprise peptides that are designed to induce T cell responses against different target polypeptides, that is the selected fragments of the target polypeptides comprised in the peptides are from different target polypeptides. In some cases the panel comprises such fragments from at least 2, 3, 4, 5, 6, 7, 8, 9, 10, 11, 12, 13, 14, 15, 16, 17, 18, 19, 20, 21, 22, 23, 24, 25, 26, 27, 28, 29, 30, 31, 32, 33, 34, 35, 36, 37, 38, 39 or 40 different target polypeptides.

[0173] The different target polypeptides may be any different polypeptides that it is useful to target or that can be selectively targeted with different PEPIs as described herein. In some cases different target polypeptide antigens are non-homologues or non-paralogues or have less than 95%, or 90%, or 85% or 80% or 75% or 70% or 60% or 50% sequence identity across the full length of each polypeptide.

[0174] In some cases the different target polypeptides targeted by the peptides of a panel are each expressed by or associated with the same disease, condition, pathogen or cancer, such as any described herein. Such a panel of peptides may be ideal for use in treatment of the disease or condition in a subject in need thereof, particularly if the peptides are HLA/PEPI matched to the specific subject as described herein.

[0175] In some cases one or more or each of the target polypeptides is present in a sample taken from a human subject. This indicates that the polypeptide(s) are expressed in the subject, for example a cancer- or tumor-associated antigen, TSA or CTA expressed by cancer cells of the subject.

[0176] In some cases 1, 2, 3, 4, 5, 6, 7, 8, 9, 10, 11, 12, 13, 14, 15, 16, 17, 18, 19, 20, 21, 22, 23, 24, or 25 or more or each of the target polypeptide antigens is a TSA and/or a CTA.

### Selection of Polypeptides and Patients

[0177] The peptides described herein may be used to induce T cell responses or provide vaccination or immunotherapy in a subject in need therefore. More than one peptide will typically be selected for treatment of a subject. Each peptide may be selected for treatment of a subject based on (i) the disease or condition to be treated in the subject; and/or (ii) the HLA genotype of the subject.

[0178] Each peptide selected for treatment of a subject may comprise a fragment as described herein of a target polypeptide antigen that is associated with the disease or condition to be treated in the subject, or expressed by target cells of the treatment, such as cancer cells. The disease or condition and the target polypeptide antigens may be any described herein. Typically each peptide selected for treatment of the subject will comprise a fragment as described herein of a different target polypeptide antigen. The target polypeptide antigens may be selected because they are known to be expressed by target cells in the subject. For example the target polypeptide antigens may have been detected in a sample obtained from the subject, such as a tumor biopsy. In other cases, the target polypeptide antigens may be selected based on their expression rate in the cells that are targeted by the treatment, for example the expression rate of a particular TAA in cancer or a particular type of cancer, such as any described herein. Typically the peptides selected for the treatment of the subject are those that comprise a fragment as described herein of the polypeptide antigens associated with the condition at the highest expression rates for the condition to be treated. Further the fragments typically have been predicted to induce a T cell response in the specific subject, as further described herein.

[0179] Polypeptide antigens, and particularly short peptides derived from polypeptide antigens, that are commonly used in vaccination and immunotherapy, induce immune responses in only a fraction of human subjects. The peptides of the present disclosure are specifically selected to induce immune responses in a high proportion of the general population, or a high proportion of a given intent-to-treat population. However, but they may not be effective in all individuals or all subjects of the intent-to-treat population due to HLA genotype heterogeneity.

[0180] In some cases the present disclosure provides a method of predicting that a specific human subject will have a T cell response (cytotoxic and/or helper) to administration of any of the peptides, panels of peptides or pharmaceutical compositions or kits described herein. As provided herein T cell epitope presentation by multiple HLAs of an individual is generally needed to trigger a T cell response. The best predictor of a cytotoxic (CD8+) T cell response to a given polypeptide is the presence of at least one T cell epitope that is presented by at least three HLA class I alleles of a subject (≥1 PEPI3+). Similarly the presence of at least one T cell epitope that is presented by at least three or four HLA class II alleles of a subject may be predictive of a helper (CD4+) T cell response. If such T cell epitopes correspond to a fragment of a target polypeptide antigen, such as any target polypeptide antigen described herein, then the subject is predicted to mount a T cell response that targets cells in the subject that express the target polypeptide, if present. Accordingly in some cases the method may be for predicting a T cell response in a subject to a target polypeptide antigen, such as any described herein.

[0181] The inventors have further discovered that the presence in a vaccine or immunotherapy composition of at least two T cell epitopes that (i) correspond to fragments of one or more target polypeptide antigens, and (ii) can bind to at least three HLA class I alleles of an individual is predictive for a clinical response. For example, if an individual has a total of ≥2 PEPI3+ within the active ingredient peptide(s) of a vaccine or immunotherapy composition, and these PEPI3+s are derived from polypeptide antigens that are in fact expressed by target cells in the individual (for example, target tumor cells of the individual express the target tumor-associated antigens), then the individual is a likely clinical responder (i.e. a clinically relevant immune responder).

[0182] A “clinical response” or “clinical benefit” as used herein may be the prevention or a delay in the onset of a disease or condition, the amelioration of one or more symptoms, the induction or prolonging of remission, or the delay of a relapse or recurrence or deterioration, or any other improvement or stabilisation in the disease status of a subject. Where appropriate, a “clinical response” may correlate to “disease control” or an “objective response” as defined by the Response Evaluation Criteria In Solid Tumors (RECIST) guidelines.

[0183] Accordingly some aspects of the disclosure relate to a method of predicting that a specific human subject will have a clinical response to a method of treatment as described herein or to administration of a pharmaceutical composition or the peptides, nucleic acids or vectors of a pharmaceutical kit described herein.

[0184] In some cases the method comprises determining that the active ingredient peptide(s) for treatment of the subject comprise two or more different amino acid sequences each of which is a) a fragment of a target polypeptide antigen expressed by target cells of the subject (for example, polypeptide antigens that have been detected in a biopsy); and b) a T cell epitope capable of binding to at least three HLA class I of the subject.

[0185] In some cases the likelihood that a subject will have a clinical response to a peptide vaccine or immunotherapy composition, such as those described herein, can be determined without knowing whether the target antigens are expressed in target cells, such as cancer cells of the subject and/or without determining the HLA class I genotype of the subject. Known antigen expression frequencies in the disease (e.g. MAGE-A3 in a tumor type like gastric cancer) and/or known frequencies for HLA class I and class II genotype of subjects in the target population (e.g ethnic population, general population, diseased population) may be used instead.

[0186] The likelihood that a subject will respond to treatment is increased by (i) the presence of more multiple HLA-binding PEPIs in the active ingredient polypeptides; (ii) the presence of PEPIs in more target polypeptide antigens; and (iii) expression of the target polypeptide antigens in the subject or in diseased cells of the subject. The probability that target cells in the subject (over-)express a specific or any combination of target polypeptide antigens may be determined using population expression frequency data (expression rates), e.g. probability of expression of an antigen in gastric cancer. The population expression frequency data may relate to a subject- and/or disease-matched population or the intent-to-treat population. For example, the frequency or probability of expression of a particular cancer-associated antigen in a particular cancer or subject having a particular cancer, for example breast cancer, can be determined by detecting the antigen in tumor, e.g. breast cancer tumor samples. Such expression frequencies may be determined from published figures and scientific publications. In some cases a method of the disclosure may comprise a step of determining the expression frequency of a relevant target polypeptide antigen in a relevant population.

[0187] Disclosed is a range of pharmacodynamic biomarkers to predict the activity/effect of vaccines in individual human subjects as well as in populations of human subjects. These biomarkers expedite more effective vaccine development and also decrease the development cost and may be used to assess and compare different compositions. Exemplary biomarkers are as follows.
[0188] AG95—potency of a vaccine: The number of antigens in a cancer vaccine that a specific tumor type expresses with 95% probability. AG95 is an indicator of the vaccine's potency, and is independent of the immunogenicity of the vaccine antigens. AG95 is calculated from the tumor antigen expression rate data. Such data may be obtained from experiments published in peer reviewed scientific journals. Technically, AG95 is determined from the binomial distribution of antigens in the vaccine, and takes into account all possible variations and expression rates.
[0189] PEPI3+ count—immunogenicity of a vaccine in a subject: Vaccine-derived PEPI3+ are personal epitopes that bind to at least 3 HLAs of a subject and induce T cell responses. PEPI3+ can be determined using the PEPI3+ Test in subjects who's complete 4-digit HLA genotype is known.
[0190] AP count—antigenicity of a vaccine in a subject: Number of vaccine antigens with PEPI3+. Vaccines contain sequences from target polypeptide antigens expressed by diseased cells. AP count is the number of antigens in the vaccine that contain PEPI3+, and the AP count represents the number of antigens in the vaccine that can induce T cell responses in a subject. AP count characterizes the vaccine-antigen specific T cell responses of the subject since it depends only on the HLA genotype of the subject and is independent of the subject's disease, age, and medication. The correct value is between 0 (no PEPI presented by the antigen) and maximum number of antigens (all antigens present PEPIs).
[0191] AP50—antigenicity of a vaccine in a population: The mean number of vaccine antigens with a PEPI in a population. The AP50 is suitable for the characterization of vaccine-antigen specific T cell responses in a given population since it depends on the HLA genotype of subjects in a population.
[0192] AGP count—effectiveness of a vaccine in a subject: Number of vaccine antigens expressed in the tumor with PEPI. The AGP count indicates the number of tumor antigens that vaccine recognizes and induces a T cell response against (hit the target). The AGP count depends on the vaccine-antigen expression rate in the subject's tumor and the HLA genotype of the subject. The correct value is between 0 (no PEPI presented by expressed antigen) and maximum number of antigens (all antigens are expressed and present a PEPI).
[0193] AGP50—effectiveness of a cancer vaccine in a population: The mean number of vaccine antigens expressed in the indicated tumor with PEPI (i.e., AGP) in a population. The AGP50 indicates the mean number of tumor antigens that the T cell responses induced by the vaccine can recognize. AGP50 is dependent on the expression rate of the antigens in the indicated tumor type and the immunogenicity of the antigens in the target population. AGP50 can estimate a vaccine's effectiveness in different populations and can be used to compare different vaccines in the same population. The computation of AGP50 is similar to that used for AG50, except the expression is weighted by the occurrence of the PEPI3+ in the subject on the expressed vaccine antigens. In a theoretical population, where each subject has a PEPI from each vaccine antigen, the AGP50 will be equal to AG50. In another theoretical population, where no subject has a PEPI from any vaccine antigen, the AGP50 will be 0. In general, the following statement is valid: 0≤AGP50≤AG50.
[0194] mAGP—a candidate biomarker for the selection of likely responders: Likelihood that a cancer vaccine induces T cell responses against multiple antigens expressed in the indicated tumor. mAGP is calculated from the expression rates of vaccine-antigens in the tumor and the presence of vaccine derived PEPIs in the subject. Technically, based on the AGP distribution, the mAGP is the sum of probabilities of the multiple AGP (≥2 AGPs).

[0195] The results of a prediction as set out above may be used to inform a physician's decisions concerning treatment of the subject. Accordingly, in some cases the method of the disclosure predicts that a subject will have or is likely to have a T cell response and/or a clinical response to a treatment as described herein, and the method further comprises selecting the treatment for the human subject. In some cases a subject is selected for treatment if their likelihood of a response targeted at a predefined number of target polypeptide antigens, optionally wherein the target polypeptide antigens are (predicted to be) expressed, is above a predetermined threshold. In some cases the number of target polypeptide antigens or epitopes is two. In some cases the number of target polypeptide antigens or epitopes is three, or four, or five, or six, or seven, or eight, or nine, or ten. The method may further comprise administering the treatment to the human subject. Alternatively, the method may predict that the subject will not have an immune response and/or a clinical response and further comprise selecting a different treatment for the subject.

### Pharmaceutical Compositions, Methods of Treatment and Modes of Administration

[0196] In some aspects the disclosure relates to a pharmaceutical composition or kit comprising one or more of the peptides, polynucleic acids or vectors described herein. Such pharmaceutical compositions or kits may be for use in a method of inducing an immune response, treating, vaccinating or providing immunotherapy to a subject. The pharmaceutical composition or kit may be a vaccine or immunotherapy composition or kit. Such treatment may comprise administering the pharmaceutical composition or the peptides, polynucleic acids or vectors of the kit to the subject.

[0197] The pharmaceutical compositions or kits described herein may comprise, in addition to one or more peptides, nucleic acids or vectors, a pharmaceutically acceptable excipient, carrier, diluent, buffer, stabiliser, preservative, adjuvant or other materials well known to those skilled in the art. Such materials are preferably non-toxic and preferably do not interfere with the pharmaceutical activity of the active ingredient(s). The pharmaceutical carrier or diluent may be, for example, water containing solutions. The precise nature of the carrier or other material may depend on the route of administration, e.g. oral, intravenous, cutaneous or subcutaneous, nasal, intramuscular, intradermal, and intraperitoneal routes.

[0198] The pharmaceutical compositions of the disclosure may comprise one or more “pharmaceutically acceptable carriers”. These are typically large, slowly metabolized macromolecules such as proteins, saccharides, polylactic acids, polyglycolic acids, polymeric amino acids, amino acid copolymers, sucrose (Paoletti et al., 2001, Vaccine, 19:2118), trehalose (WO 00/56365), lactose and lipid aggregates (such as oil droplets or liposomes). Such carriers are well known to those of ordinary skill in the art. The pharmaceutical compositions may also contain diluents, such as water, saline, glycerol, etc. Additionally, auxiliary substances, such as wetting or emulsifying agents, pH buffering substances, and the like, may be present. Sterile pyrogen-free, phosphate buffered physiologic saline is a typical carrier (Gennaro, 2000, Remington: The Science and Practice of Pharmacy, 20th edition, ISBN:0683306472).

[0199] The pharmaceutical compositions of the disclosure may be lyophilized or in aqueous form, i.e. solutions or suspensions. Liquid formulations of this type allow the compositions to be administered direct from their packaged form, without the need for reconstitution in an aqueous medium, and are thus ideal for injection. The pharmaceutical compositions may be presented in vials, or they may be presented in ready filled syringes. The syringes may be supplied with or without needles. A syringe will include a single dose, whereas a vial may include a single dose or multiple doses.

[0200] Liquid formulations of the disclosure are also suitable for reconstituting other medicaments from a lyophilized form. Where a pharmaceutical composition is to be used for such extemporaneous reconstitution, the disclosure provides a kit, which may comprise two vials, or may comprise one ready-filled syringe and one vial, with the contents of the syringe being used to reconstitute the contents of the vial prior to injection.

[0201] The pharmaceutical compositions of the disclosure may include an antimicrobial, particularly when packaged in a multiple dose format. Antimicrobials may be used, such as 2-phenoxyethanol or parabens (methyl, ethyl, propyl parabens). Any preservative is preferably present at low levels. Preservative may be added exogenously and/or may be a component of the bulk antigens which are mixed to form the composition (e.g. present as a preservative in pertussis antigens).

[0202] The pharmaceutical compositions of the disclosure may comprise detergent e.g. Tween (polysorbate), DMSO (dimethyl sulfoxide), DMF (dimethylformamide). Detergents are generally present at low levels, e.g. <0.01%, but may also be used at higher levels, e.g. 0.01-50%.

[0203] The pharmaceutical compositions of the disclosure may include sodium salts (e.g. sodium chloride) and free phosphate ions in solution (e.g. by the use of a phosphate buffer).

[0204] In certain embodiments, the pharmaceutical composition may be encapsulated in a suitable vehicle either to deliver the peptides into antigen presenting cells or to increase the stability. As will be appreciated by a skilled artisan, a variety of vehicles are suitable for delivering a pharmaceutical composition of the disclosure. Non-limiting examples of suitable structured fluid delivery systems may include nanoparticles, liposomes, microemulsions, micelles, dendrimers and other phospholipid-containing systems. Methods of incorporating pharmaceutical compositions into delivery vehicles are known in the art.

[0205] In order to increase the immunogenicity of the composition, the pharmacological compositions may comprise one or more adjuvants and/or cytokines.

[0206] Suitable adjuvants include an aluminum salt such as aluminum hydroxide or aluminum phosphate, but may also be a salt of calcium, iron or zinc, or may be an insoluble suspension of acylated tyrosine, or acylated sugars, or may be cationically or anionically derivatised saccharides, polyphosphazenes, biodegradable microspheres, monophosphoryl lipid A (MPL), lipid A derivatives (e.g. of reduced toxicity), 3-O-deacylated MPL [3D-MPL], quil A, Saponin, QS21, Freund's Incomplete Adjuvant (Difco Laboratories, Detroit, Mich.), Merck Adjuvant 65 (Merck and Company, Inc., Rahway, N.J.), AS-2 (Smith-Kline Beecham, Philadelphia, Pa.), CpG oligonucleotides, bioadhesives and mucoadhesives, microparticles, liposomes, polyoxyethylene ether formulations, polyoxyethylene ester formulations, muramyl peptides or imidazoquinolone compounds (e.g. imiquamod and its homologues). Human immunomodulators suitable for use as adjuvants in the disclosure include cytokines such as interleukins (e.g. IL-1, IL-2, IL-4, IL-5, IL-6, IL-7, IL-12, etc), macrophage colony stimulating factor (M-CSF), tumour necrosis factor (TNF), granulocyte, macrophage colony stimulating factor (GM-CSF) may also be used as adjuvants.

[0207] In some embodiments, the compositions comprise an adjuvant selected from the group consisting of Montanide ISA-51 (Seppic, Inc., Fairfield, N.J., United States of America), QS-21 (Aquila Biopharmaceuticals, Inc., Lexington, Mass., United States of America), GM-CSF, cyclophosamide, bacillus Calmette-Guerin (BCG), Corynbacterium parvum, levamisole, azimezone, isoprinisone, dinitrochlorobenezene (DNCB), keyhole limpet hemocyanins (KLH), Freunds adjuvant (complete and incomplete), mineral gels, aluminum hydroxide (Alum), lysolecithin, pluronic polyols, polyanions, oil emulsions, dinitrophenol, diphtheria toxin (DT).

[0208] By way of example, the cytokine may be selected from the group consisting of a transforming growth factor (TGF) such as but not limited to TGF-α and TGF-β; insulin-like growth factor-I and/or insulin-like growth factor-II; erythropoietin (EPO); an osteoinductive factor; an interferon such as but not limited to interferon-α, -β, and -γ; a colony stimulating factor (CSF) such as but not limited to macrophage-CSF (M-CSF); granulocyte-macrophage-CSF (GM-CSF); and granulocyte-CSF (G-CSF). In some embodiments, the cytokine is selected from the group consisting of nerve growth factors such as NGF-β; platelet-growth factor; a transforming growth factor (TGF) such as but not limited to TGF-α, and TGF-β; insulin-like growth factor-I and insulin-like growth factor-II; erythropoietin (EPO); an osteoinductive factor; an interferon (IFN) such as but not limited to IFN-α, IFN-β, and IFN-γ; a colony stimulating factor (CSF) such as macrophage-CSF (M-CSF); granulocyte-macrophage-CSF (GM-CSF); and granulocyte-CSF (G-CSF); an interleukin (I1) such as but not limited to IL-1, IL-1.alpha., IL-2, IL-3, IL-4, IL-5, IL-6, IL-7, IL-8, IL-9, IL-10, IL-11, IL-12; IL-13, IL-14, IL-15, IL-16, IL-17, IL-18; LIF; kit-ligand or FLT-3; angiostatin; thrombospondin; endostatin; a tumor necrosis factor (TNF); and LT.

[0209] It is expected that an adjuvant or cytokine can be added in an amount of about 0.01 mg to about 10 mg per dose, preferably in an amount of about 0.2 mg to about 5 mg per dose. Alternatively, the adjuvant or cytokine may be at a concentration of about 0.01 to 50%, preferably at a concentration of about 2% to 30%.

[0210] In certain aspects, the pharmaceutical compositions of the disclosure are prepared by physically mixing the adjuvant and/or cytokine with the PEPIs under appropriate sterile conditions in accordance with known techniques to produce the final product.

[0211] Examples of suitable compositions of polypeptide fragments and methods of administration are provided in Esseku and Adeyeye (2011) and Van den Mooter G. (2006). Vaccine and immunotherapy composition preparation is generally described in Vaccine Design (“The subunit and adjuvant approach” (eds Powell M. F. & Newman M. J. (1995) Plenum Press New York). Encapsulation within liposomes, which is also envisaged, is described by Fullerton, U.S. Pat. No. 4,235,877.

[0212] In some embodiments, the compositions disclosed herein are prepared as a nucleic acid vaccine. In some embodiments, the nucleic acid vaccine is a DNA vaccine. In some embodiments, DNA vaccines, or gene vaccines, comprise a plasmid with a promoter and appropriate transcription and translation control elements and a nucleic acid sequence encoding one or more polypeptides of the disclosure. In some embodiments, the plasmids also include sequences to enhance, for example, expression levels, intracellular targeting, or proteasomal processing. In some embodiments, DNA vaccines comprise a viral vector containing a nucleic acid sequence encoding one or more polypeptides of the disclosure. In additional aspects, the compositions disclosed herein comprise one or more nucleic acids encoding peptides determined to have immunoreactivity with a biological sample. For example, in some embodiments, the compositions comprise one or more nucleotide sequences encoding 1, 2, 3, 4, 5, 6, 7, 8, 9, 10, 11, 12, 13, 14, 15, 16, 17, 18, 19, 20, or more peptides comprising a fragment that is a T cell epitope capable of binding to at least three HLA class I molecules and/or at least three or four HLA class II molecules of a patient. In some embodiments, the peptides are derived from an antigen that is expressed in cancer. In some embodiments the DNA or gene vaccine also encodes immunomodulatory molecules to manipulate the resulting immune responses, such as enhancing the potency of the vaccine, stimulating the immune system or reducing immunosuppression. Strategies for enhancing the immunogenicity of DNA or gene vaccines include encoding of xenogeneic versions of antigens, fusion of antigens to molecules that activate T cells or trigger associative recognition, priming with DNA vectors followed by boosting with viral vector, and utilization of immunomodulatory molecules. In some embodiments, the DNA vaccine is introduced by a needle, a gene gun, an aerosol injector, with patches, via microneedles, by abrasion, among other forms. In some forms the DNA vaccine is incorporated into liposomes or other forms of nanobodies. In some embodiments, the DNA vaccine includes a delivery system selected from the group consisting of a transfection agent; protamine; a protamine liposome; a polysaccharide particle; a cationic nanoemulsion; a cationic polymer; a cationic polymer liposome; a cationic nanoparticle; a cationic lipid and cholesterol nanoparticle; a cationic lipid, cholesterol, and PEG nanoparticle; a dendrimer nanoparticle. In some embodiments, the DNA vaccines are administered by inhalation or ingestion. In some embodiments, the DNA vaccine is introduced into the blood, the thymus, the pancreas, the skin, the muscle, a tumor, or other sites.

[0213] In some embodiments, the compositions disclosed herein are prepared as an RNA vaccine. In some embodiments, the RNA is non-replicating mRNA or virally derived, self-amplifying RNA. In some embodiments, the non-replicating mRNA encodes the peptides disclosed herein and contains 5′ and 3′ untranslated regions (UTRs). In some embodiments, the virally derived, self-amplifying RNA encodes not only the peptides disclosed herein but also the viral replication machinery that enables intracellular RNA amplification and abundant protein expression. In some embodiments, the RNA is directly introduced into the individual. In some embodiments, the RNA is chemically synthesized or transcribed in vitro. In some embodiments, the mRNA is produced from a linear DNA template using a T7, a T3, or an Sp6 phage RNA polymerase, and the resulting product contains an open reading frame that encodes the peptides disclosed herein, flanking UTRs, a 5′ cap, and a poly(A) tail. In some embodiments, various versions of 5′ caps are added during or after the transcription reaction using a vaccinia virus capping enzyme or by incorporating synthetic cap or anti-reverse cap analogues. In some embodiments, an optimal length of the poly(A) tail is added to mRNA either directly from the encoding DNA template or by using poly(A) polymerase. The RNA may encode one or more peptides comprising a fragment that is a T cell epitope capable of binding to at least three HLA class I and/or at least three or four HLA class II molecules of a patient. In some embodiments, the fragments are derived from an antigen that is expressed in cancer. In some embodiments, the RNA includes signals to enhance stability and translation. In some embodiments, the RNA also includes unnatural nucleotides to increase the half-life or modified nucleosides to change the immunostimulatory profile. In some embodiments, the RNAs is introduced by a needle, a gene gun, an aerosol injector, with patches, via microneedles, by abrasion, among other forms. In some forms the RNA vaccine is incorporated into liposomes or other forms of nanobodies that facilitate cellular uptake of RNA and protect it from degradation. In some embodiments, the RNA vaccine includes a delivery system selected from the group consisting of a transfection agent; protamine; a protamine liposome; a polysaccharide particle; a cationic nanoemulsion; a cationic polymer; a cationic polymer liposome; a cationic nanoparticle; a cationic lipid and cholesterol nanoparticle; a cationic lipid, cholesterol, and PEG nanoparticle; a dendrimer nanoparticle; and/or naked mRNA; naked mRNA with in vivo electroporation; protamine-complexed mRNA; mRNA associated with a positively charged oil-in-water cationic nanoemulsion; mRNA associated with a chemically modified dendrimer and complexed with polyethylene glycol (PEG)-lipid; protamine-complexed mRNA in a PEG-lipid nanoparticle; mRNA associated with a cationic polymer such as polyethylenimine (PEI); mRNA associated with a cationic polymer such as PEI and a lipid component; mRNA associated with a polysaccharide (for example, chitosan) particle or gel; mRNA in a cationic lipid nanoparticle (for example, 1,2-dioleoyloxy-3-trimethylammoniumpropane (DOTAP) or dioleoylphosphatidylethanolainine (DOPE) lipids); snRNA complexed with cationic lipids and cholesterol; or mRNA complexed with cationic lipids, cholesterol and PEG-lipid. In some embodiments, the RNA vaccine is administered by inhalation or ingestion. In some embodiments, the RNA is introduced into the blood, the thymus, the pancreas, the skin, the muscle, a tumor, or other sites, and/or by an intradermal, intramuscular, subcutaneous, intranasal, intranodal, intravenous, intrasplenic, intratumoral or other delivery route.

[0214] Polynucleotide or oligonucleotide components may be naked nucleotide sequences or be in combination with cationic lipids, polymers or targeting systems. They may be delivered by any available technique. For example, the polynucleotide or oligonucleotide may be introduced by needle injection, preferably intradermally, subcutaneously or intramuscularly. Alternatively, the polynucleotide or oligonucleotide may be delivered directly across the skin using a delivery device such as particle-mediated gene delivery. The polynucleotide or oligonucleotide may be administered topically to the skin, or to mucosal surfaces for example by intranasal, oral, or intrarectal administration.

[0215] Uptake of polynucleotide or oligonucleotide constructs may be enhanced by several known transfection techniques, for example those including the use of transfection agents. Examples of these agents include cationic agents, for example, calcium phosphate and DEAE-Dextran and lipofectants, for example, lipofectam and transfectam. The dosage of the polynucleotide or oligonucleotide to be administered can be altered.

[0216] Administration is typically in a “prophylactically effective amount” or a “therapeutically effective amount” (as the case may be, although prophylaxis may be considered therapy), this being sufficient to result in a clinical response or to show clinical benefit to the individual, e.g. an effective amount to prevent or delay onset of the disease or condition, to ameliorate one or more symptoms, to induce or prolong remission, or to delay relapse or recurrence.

[0217] The dose may be determined according to various parameters, especially according to the substance used; the age, weight and condition of the individual to be treated; the route of administration; and the required regimen. The amount of antigen in each dose is selected as an amount which induces an immune response. A physician will be able to determine the required route of administration and dosage for any particular individual. The dose may be provided as a single dose or may be provided as multiple doses, for example taken at regular intervals, for example 2, 3 or 4 doses administered hourly. Typically peptides, polynucleotides or oligonucleotides are typically administered in the range of 1 pg to 1 mg, more typically 1 pg to 10 μg for particle mediated delivery and 1 μg to 1 mg, more typically 1-100 μg, more typically 5-50 μg for other routes. Generally, it is expected that each dose will comprise 0.01-3 mg of antigen. An optimal amount for a particular vaccine can be ascertained by studies involving observation of immune responses in subjects.

[0218] Examples of the techniques and protocols mentioned above can be found in Remington's Pharmaceutical Sciences, 20th Edition, 2000, pub. Lippincott, Williams & Wilkins.

[0219] In some cases the method of treatment may comprise administration to a subject of more than one peptide, polynucleic acid or vector. These may be administered together/simultaneously and/or at different times or sequentially. The use of combinations of different peptides, optionally targeting different antigens, may be important to overcome the challenges of genetic heterogeneity of tumors and HLA heterogeneity of individuals. The use of peptides of the disclosure in combination expands the group of individuals who can experience clinical benefit from vaccination. Multiple pharmaceutical compositions of PEPIs, manufactured for use in one regimen, may define a drug product. In some cases different peptides, polynucleic acids or vectors of a single treatment may be administered to the subject within a period of, for example, 1 year, or 6 months, or 3 months, or 60 or 50 or 40 or 30 days.

[0220] Routes of administration include but are not limited to intranasal, oral, subcutaneous, intradermal, and intramuscular. The subcutaneous administration is particularly preferred. Subcutaneous administration may for example be by injection into the abdomen, lateral and anterior aspects of upper arm or thigh, scapular area of back, or upper ventrodorsal gluteal area.

[0221] The compositions of the disclosure may also be administered in one, or more doses, as well as, by other routes of administration. For example, such other routes include, intracutaneously, intravenously, intravascularly, intraarterially, intraperitnoeally, intrathecally, intratracheally, intracardially, intralobally, intramedullarly, intrapulmonarily, and intravaginally. Depending on the desired duration of the treatment, the compositions according to the disclosure may be administered once or several times, also intermittently, for instance on a monthly basis for several months or years and in different dosages.

[0222] Solid dosage forms for oral administration include capsules, tablets, caplets, pills, powders, pellets, and granules. In such solid dosage forms, the active ingredient is ordinarily combined with one or more pharmaceutically acceptable excipients, examples of which are detailed above. Oral preparations may also be administered as aqueous suspensions, elixirs, or syrups. For these, the active ingredient may be combined with various sweetening or flavoring agents, coloring agents, and, if so desired, emulsifying and/or suspending agents, as well as diluents such as water, ethanol, glycerin, and combinations thereof.

[0223] One or more compositions of the disclosure may be administered, or the methods and uses for treatment according to the disclosure may be performed, alone or in combination with other pharmacological compositions or treatments, for example chemotherapy and/or immunotherapy and/or vaccine. The other therapeutic compositions or treatments may for example be one or more of those discussed herein, and may be administered either simultaneously or sequentially with (before or after) the composition or treatment of the disclosure.

[0224] In some cases the treatment may be administered in combination with checkpoint blockade therapy/checkpoint inhibitors, co-stimulatory antibodies, cytotoxic or non-cytotoxic chemotherapy and/or radiotherapy, targeted therapy or monoclonal antibody therapy. It has been demonstrated that chemotherapy sensitizes tumors to be killed by tumor specific cytotoxic T cells induced by vaccination (Ramakrishnan et al. J Clin Invest. 2010; 120(4):1111-1124). Examples of chemotherapy agents include alkylating agents including nitrogen mustards such as mechlorethamine (HN2), cyclophosphamide, ifosfamide, melphalan (L-sarcolysin) and chlorambucil; anthracyclines; epothilones; nitrosoureas such as carmustine (BCNU), lomustine (CCNU), semustine (methyl-CCNU) and streptozocin (streptozotocin); triazenes such as decarbazine (DTIC; dimethyltriazenoimidazole-carboxamide; ethylenimines/methylmelamines such as hexamethylmelamine, thiotepa; alkyl sulfonates such as busulfan; Antimetabolites including folic acid analogues such as methotrexate (amethopterin); alkylating agents, antimetabolites, pyrimidine analogs such as fluorouracil (5-fluorouracil; 5-FU), floxuridine (fluorodeoxyuridine; FUdR) and cytarabine (cytosine arabinoside); purine analogues and related inhibitors such as mercaptopurine (6-mercaptopurine; 6-MP), thioguanine (6-thioguanine; TG) and pentostatin (2′-deoxycoformycin); epipodophylotoxins; enzymes such as L-asparaginase; biological response modifiers such as IFNα, IL-2, G-CSF and GM-CSF; platinum coordination complexes such as cisplatin (cis-DDP), oxaliplatin and carboplatin; anthracenediones such as mitoxantrone and anthracycline; substituted urea such as hydroxyurea; methylhydrazine derivatives including procarbazine (N-methylhydrazine, MIH) and procarbazine; adrenocortical suppressants such as mitotane (o,p′-DDD) and aminoglutethimide; taxol and analogues/derivatives; hormones/hormonal therapy and agonists/antagonists including adrenocorticosteroid antagonists such as prednisone and equivalents, dexamethasone and aminoglutethimide, progestin such as hydroxyprogesterone caproate, medroxyprogesterone acetate and megestrol acetate, estrogen such as diethylstilbestrol and ethinyl estradiol equivalents, antiestrogen such as tamoxifen, androgens including testosterone propionate and fluoxymesterone/equivalents, antiandrogens such as flutamide, gonadotropin-releasing hormone analogs and leuprolide and non-steroidal antiandrogens such as flutamide; natural products including vinca alkaloids such as vinblastine (VLB) and vincristine, epipodophyllotoxins such as etoposide and teniposide, antibiotics such as dactinomycin (actinomycin D), daunorubicin (daunomycin; rubidomycin), doxorubicin, bleomycin, plicamycin (mithramycin) and mitomycin (mitomycin C), enzymes such as L-asparaginase, and biological response modifiers such as interferon alphenomes.

[0225] In some cases the method of treatment is a method of vaccination or a method of providing immunotherapy. As used herein, “immunotherapy” is the treatment of a disease or condition by inducing or enhancing an immune response in an individual. In certain embodiments, immunotherapy refers to a therapy that comprises the administration of one or more drugs to an individual to elicit T cell responses. In a specific embodiment, immunotherapy refers to a therapy that comprises the administration or expression of polypeptides that contain one or more PEPIs to an individual to elicit a T cell response to recognize and kill cells that display the one or more PEPIs on their cell surface in conjunction with a class I HLA. In another specific embodiment, immunotherapy comprises the administration of one or more PEPIs to an individual to elicit a cytotoxic T cell response against cells that display tumor associated antigens (TAAs), tumor specific antigens (TSAs) or cancer testis antigens (CTAs) comprising the one or more PEPIs on their cell surface. In another embodiment, immunotherapy refers to a therapy that comprises the administration or expression of polypeptides that contain one or more PEPIs presented by class II HLAs to an individual to elicit a T helper response to provide co-stimulation to cytotoxic T cells that recognize and kill diseased cells that display the one or more PEPIs on their cell surface in conjunction with a class I HLAs. In still another specific embodiment, immunotherapy refers to a therapy that comprises administration of one or more drugs to an individual that re-activate existing T cells to kill target cells. The theory is that the cytotoxic T cell response will eliminate the cells displaying the one or more PEPIs, thereby improving the clinical condition of the individual. In some instances, immunotherapy may be used to treat tumors. In other instances, immunotherapy may be used to treat intracellular pathogen-based diseases or disorders.

[0226] In some cases the disclosure relates to the treatment of cancer or any specific type of cancer described herein. In some other cases the disclosure relates to the treatment of a viral, bacterial, fungal or parasitic infection, or any other disease or condition that may be treated by immunotherapy.

### Further Embodiments of the Disclosure

[0227] 1. A pharmaceutical composition, comprising two or more different peptides, wherein each peptide is up to 50 amino acids in length and comprises the amino acid sequence of any of SEQ ID NOs: 1 to 2786 and/or 5432 to 5931.

[0228] 2. The pharmaceutical composition of item 1, comprising at least 3, at least 4, at least 5, at least 6, at least 7, at least 8, at least 9, at least 10, at least 11, or at least 12 different peptides, wherein each peptide is up to 50 amino acids in length and comprises the amino acid sequence of any of SEQ ID Nos: 1 to 2786 and/or 5432 to 5931.

[0229] 3. A pharmaceutical composition comprising one or more polynucleic acids or vectors that encode two or more peptides wherein each peptide is up to 50 amino acids in length and comprises the amino acid sequence of any of SEQ ID NOs: 1 to 2786 and/or 5432 to 5931.

[0230] 4. The pharmaceutical composition of item 2 comprising at least 2, at least 3, at least 4, at least 5, at least 6, at least 7, at least 8, at least 9, at least 10, at least 11, or at least 12 polynucleic acids or vectors.

[0231] 5. The pharmaceutical composition of item 1 or item 3, wherein each peptide or encoded peptide comprises at least one amino acid sequence selected from one of the following groups:
[0232] (a) the sequences listed in Table 25A and/or 25B and indicated in Table 25A or 25B to be a fragment of a breast cancer-associated antigen listed in Table 24;
[0233] (b) the sequences listed in Table 25A and/or Table 25B and indicated in Table 25A or 25B to be a fragment of a lung cancer-associated antigen listed in Table 24;
[0234] (c) the sequences listed in Table 25A and/or Table 25B and indicated in Table 25A or 25B to be a fragment of a prostate cancer-associated antigen listed in Table 24;
[0235] (d) the sequences listed in Table 25A and/or Table 25B and indicated in Table 25A or 25B to be a fragment of a colorectal cancer-associated antigen listed in Table 24;
[0236] (e) the sequences listed in Table 25A and/or Table 25B and indicated in Table 25A or 25B to be a fragment of a bladder cancer-associated antigen listed in Table 24;
[0237] (f) the sequences listed in Table 25A and/or Table 25B and indicated in Table 25A or 25B to be a fragment of a ovarian cancer-associated antigen listed in Table 24;
[0238] (g) the sequences listed in Table 25A and/or Table 25B and indicated in Table 25A or 25B to be a fragment of a pancreatic cancer-associated antigen listed in Table 24;
[0239] (h) the sequences listed in Table 25A and/or Table 25B and indicated in Table 25A or 25B to be a fragment of a brain cancer-associated antigen listed in Table 24;
[0240] (i) the sequences listed in Table 25A and/or Table 25B and indicated in Table 25A or 25B to be a fragment of a leukemia-associated antigen listed in Table 24;
[0241] (j) the sequences listed in Table 25A and/or Table 25B and indicated in Table 25A or 25B to be a fragment of a lymphoma-associated antigen listed in Table 24;
[0242] (k) the sequences listed in Table 25A and/or Table 25B and indicated in Table 25A or 25B to be a fragment of a hepatocellular cancer-associated antigen listed in Table 24;
[0243] (l) the sequences listed in Table 25A and/or Table 25B and indicated in Table 25A or 25B to be a fragment of a melanoma-associated antigen listed in Table 24;
[0244] (m) the sequences listed in Table 25A and/or Table 25B and indicated in Table 25A or 25B to be a fragment of a thyroid cancer-associated antigen listed in Table 24;
[0245] (n) the sequences listed in Table 25A and/or Table 25B and indicated in Table 25A or 25B to be a fragment of a pediatric cancer-associated antigen listed in Table 24;
[0246] (o) the sequences listed in Table 25A and/or Table 25B and indicated in Table 25A or 25B to be a fragment of a gastric cancer-associated antigen listed in Table 24;
[0247] (p) the sequences listed in Table 25A and/or Table 25B and indicated in Table 25A or 25B to be a fragment of a kidney cancer-associated antigen listed in Table 24;
[0248] (q) the sequences listed in Table 25A and/or Table 25B and indicated in Table 25A or 25B to be a fragment of a head and neck cancer-associated antigen listed in Table 24; and
[0249] (r) the sequences listed in Table 25A and/or Table 25B and indicated in Table 25A or 25B to be a fragment of a cervical cancer-associated antigen listed in Table 24.

[0250] 6. The pharmaceutical composition according to any of items 1-5 further comprising a pharmaceutically acceptable adjuvant, diluent, carrier, preservative, or a combination thereof.

[0251] 7. A kit comprising:
[0252] a. a first pharmaceutical composition comprising one or more peptides, wherein each peptide comprises a different one of the amino acid sequence of any one of SEQ ID NOs: 1 to 2786 and/or 5432 to 5931; and
[0253] b. a second different pharmaceutical composition comprising one or more peptides, wherein each peptide comprises a different one of the amino acid sequence of any one of SEQ ID NOs: 1 to 2786 and/or 5432 to 5931.

[0254] 8. The kit of item 7, further comprising a package insert.

[0255] 9. A method of inducing a cytotoxic T cell response and/or a helper T cell response in a subject of a target population, the method comprising administering a pharmaceutical composition according to any one of item 1 to item 7.

[0256] 10. The method of item 9, further comprising prior to the administering step, determining if the subject is likely to have an have a clinical response to administration of the pharmaceutical composition by
[0257] a. determining that each peptide, or encoded peptide of the pharmaceutical composition comprises at least one amino acid sequence that is a T cell epitope capable of binding to at least three HLA class I molecules of the subject; and
[0258] b. predicting that the subject will have a cytotoxic T cell response to each peptide, each encoded peptide, polynucleic acid or vector of the pharmaceutical composition.

[0259] 11. A method of vaccination, providing immunotherapy or inducing a cytotoxic T cell response in a subject, the method comprising administering to the subject a pharmaceutical composition according to any one of item 1 to item 6.

[0260] 12. The method of item 11 wherein the peptides, polynucleic acids or vectors of the pharmaceutical composition have been predicted to induce a cytotoxic T cell response and/or a helper T cell response in the subject using a method comprising:
[0261] a. determining that each peptide, or encoded peptide of the pharmaceutical composition comprises at least one amino acid sequence that is a T cell epitope capable of binding to at least three HLA class I molecules of the subject; and
[0262] b. predicting that the subject will have a cytotoxic T cell response to each peptide, encoded peptide, polynucleic acid or vector of the pharmaceutical composition. 13. The method of item 12, wherein the peptides or encoded peptides of the pharmaceutical composition are fragments of two or more different cancer associated antigens selected from those listed in Table 22.

[0263] 14. The method according to any one of item 9 to item 14 that is a method of treating cancer, optionally bladder cancer, brain cancer, breast cancer, colorectal cancer, gastric cancer, hepatocellular cancer, leukemia, lung cancer, lymphoma, melanoma, ovarian cancer, pancreatic cancer, pediatric cancer, thyroid cancer or prostate cancer.

[0264] 15. A method of designing or preparing a peptide, or a polynucleic acid or vector that encodes
[0265] a peptide, or a panel of peptides, or one or more polynucleic acid or vectors that encode a panel of peptides, for use in a method of inducing a T cell response against a target polypeptide, the method comprising
   [0266] (i) selecting or defining a model human population comprising a plurality of subjects each defined by HLA class I genotype and/or by HLA class II genotype;
   [0267] (ii) identifying for each subject of the model population:
      [0268] (a) amino acid sequences of the target polypeptide that are a T cell epitope capable of binding to at least three HLA class I molecules of the subject;
      [0269] (b) amino acid sequences of the target polypeptide that are a T cell epitope capable of binding to at least four HLA class II molecules of the subject;
      [0270] (c) amino acid sequences of the target polypeptide that comprise a T cell epitope capable of binding to at least three HLA class I molecules of the subject and a T cell epitope capable of binding to at least four HLA class II molecules of the subject; or
      [0271] (d) amino acid sequences of the target polypeptide that both
         [0272] a. are a T cell epitope capable of binding to at least four HLA class II molecules; and
         [0273] b. comprise an amino acid sequence that is a T cell epitope capable of binding to at least three HLA class I molecules of the subject;
   [0274] (iii) selecting a polypeptide fragment window length of between 9 and 50 amino acids;
   [0275] (iv) identifying a fragment of the target polypeptide that
      [0276] (c) has the length selected in step (iii); and
      [0277] (d) comprises an amino acid sequence identified in any one of step (ii) (a) to (d) in the highest proportion of subjects in the model population;
   [0278] (v) optionally testing the fragment identified in step (iv) against additional pre-defined criteria, rejecting the fragment if the further pre-defined criteria are not met, and repeating step (iv) to identify an alternative fragment of the target polypeptide that
      [0279] (a) has the length selected in step (iii); and
      [0280] (b) comprises an amino acid sequence identified in step (iv) in the next highest proportion of subjects in the model population;
   [0281] (vi) optionally repeating step (iv) and further optionally step (v) in one or more further rounds, wherein a further fragment of the target polypeptide is identified in each round, and wherein in each round subjects are excluded from the model population if any of the fragments selected in step (iv) and not rejected in step (v) of any of the preceding rounds comprises an amino acid sequence identified in step (ii) for that subject; and
   [0282] (vii) designing or preparing a peptide, a polynucleic acid or vector that encodes a peptide, a panel of peptides, or one or more polynucleic acids or vectors that encode a panel of peptides, wherein each peptide comprises one or more of the target polypeptide fragments identified in step (iv), (v) or (vi), optionally wherein the polypeptide fragment is flanked at the N and/or C terminus by additional amino acids that are not part of the sequence of the target polypeptide antigen.

[0283] 16. The method according to item 15, wherein the target polypeptide is expressed by pathogenic organism, a virus or a cancer cell, or is a cancer testes antigen, optionally wherein the target polypeptide is selected from the antigens listed in any of Tables 2 to 5.

[0284] 17. The method according to item 15 or item 16, further comprising selecting two or more peptides, polynucleic acids or vectors designed or prepared according to the method of item 15 or 16 for use in a method of vaccinating, providing immunotherapy to, or inducing a cytotoxic and/or helper T cell response in a subject, optionally wherein each of the two or more peptides or encoded peptides comprises an amino acid sequence that is
[0285] (a) a fragment of a polypeptide that is expressed by a pathogenic organism, a virus or a cancer cell; and
[0286] (b) a T cell epitope capable of binding to at least three HLA class I molecules of the subject or a T cell epitope capable of binding to at least four HLA class II molecules of the subject;
[0287] and wherein the method further comprises administering the one or more peptides, polynucleic acids or vectors to the subject.

[0288] 18. A pharmaceutical composition comprising a panel of peptides, polynucleic acids or vectors designed and/or prepared according to the method of item 15 or item 16, or comprising or encoding two or more peptides designed and/or prepared according to the method of item 15 or item 16.

[0289] 19. A pharmaceutical composition comprising a panel of peptides, or one or more polynucleic acids or vectors encoding a panel of peptides, for use in a method of inducing a T cell response against one or more target polypeptides in a subject of a target human population, wherein each of the peptides, or encoded peptides, comprises an amino acid sequence that is
[0290] (a) 9 to 50 amino acids in length; and
[0291] (b) comprises a fragment of the one or more target polypeptides, wherein the fragment comprises, in at least 10% of subjects of the intent-to-treat human population:
   [0292] a. an amino acid sequence of the target polypeptide that is a T cell epitope capable of binding to at least three HLA class I molecules of the subject;
   [0293] b. an amino acid sequence of the target polypeptide that is a T cell epitope capable of binding to at least four HLA class II molecules of the subject;
   [0294] c. an amino acid sequence of the target polypeptide that comprise a T cell epitope capable of binding to at least three HLA class I molecules of the subject and a T cell epitope capable of binding to at least four HLA class II molecules of the subject; or
   [0295] d. an amino acid sequence of the target polypeptide that both
      [0296] i. is a T cell epitope capable of binding to at least four HLA class II molecules; and
      [0297] ii. comprise an amino acid sequence that is a T cell epitope capable of binding to at least three HLA class I molecules of the subject

[0298] 20. The pharmaceutical composition according to item 18 or item 19, further comprising a pharmaceutically acceptable adjuvant, diluent, carrier, preservative, or a combination thereof.

[0299] 21. A method of vaccination, providing immunotherapy or inducing a cytotoxic T cell response in a subject, the method comprising administering to the subject a pharmaceutical composition according to any of item 18 to item 20.

[0300] 22. The method of item 21, wherein one or more or each of the peptides or the encoded peptides of the pharmaceutical composition comprises an amino acid sequence that is
[0301] (a) a fragment of a polypeptide that is expressed by a pathogenic organism, a virus or a cancer cell; and
[0302] (b) T cell epitope capable of binding to at least three HLA class I molecules of the subject or a T cell epitope capable of binding to at least four HLA class II molecules of the subject.

[0303] 23. A method of providing immunotherapy to a subject in need thereof, the method comprising: administering to the individual a pharmaceutical composition, comprising i) two or more different peptides consisting of an amino acid sequence selected from the group consisting of SEQ ID Nos: 1 to 2786 and 5432 to 5931 and ii) a pharmaceutically acceptable adjuvant, diluent, carrier, preservative, or a combination thereof, thereby inducing an immune response.

[0304] 24. The method of item 23, further comprising:
[0305] predicting that the subject will have a CD8+ T cell response and/or a CD4+ T cell response to each peptide of the pharmaceutical composition by,
[0306] (i) a) determining that each peptide comprises at least one amino acid sequence that is a T cell epitope capable of binding to at least three HLA class I molecules of the subject; and
   [0307] b) predicting that the subject will have a CD8+ T cell response to each peptide of the pharmaceutical composition or each peptide, polynucleic acid or vector of the kit; and
[0308] (ii) a) determining that each peptide comprises at least one amino acid sequence that is a T cell epitope capable of binding to at least three HLA class II molecules of the subject; and
   [0309] b) predicting that the subject will have a CD4+ T cell response to each peptide of the pharmaceutical composition.

[0310] 25. The method of item 23, wherein the pharmaceutical composition comprises at least 3, at least 4, at least 5, at least 6, at least 7, at least 8, at least 9, at least 10, at least 11, or at least 12 different peptides, wherein each peptide consists of an amino acid sequence selected from the group consisting of SEQ ID Nos: 1 to 2786 and 5432 to 5931.

[0311] 26. The method of item 23, wherein the peptides of the pharmaceutical composition are from different cancer associated antigens selected from Table 24.

[0312] 27. The method of item 23, wherein the adjuvant comprises an aluminium salt, saponin, Lipid A, or a water-in-oil emulsion.

[0313] 28. The method according to item 23, wherein the immunotherapy is a treatment for cancer.

[0314] 29. The method of item 28, wherein the cancer is bladder cancer, brain cancer, breast cancer, colorectal cancer, gastric cancer, hepatocellular cancer, leukemia, lung cancer, lymphoma, melanoma, ovarian cancer, pancreatic cancer, pediatric cancer, thyroid cancer, prostate cancer, kidney cancer, head and neck cancer, esophageal cancer and cervical cancer.

[0315] 30. A pharmaceutical composition, comprising
[0316] (a) at least two peptides consisting of 15 to 50 amino acids in length, wherein each peptide comprises a different sequence and which binds to at least three HLA class II alleles and at least three HLA class I alleles; and
[0317] (b) an immunological adjuvant.

[0318] 31. The pharmaceutical composition of item 30, wherein the at least two peptides each comprise a different sequence selected from SEQ ID Nos: 1 to 2786 and/or 5432 to 5931.

[0319] 32. The pharmaceutical composition of item 30, comprising at least 3, at least 4, at least 5, at least 6, at least 7, at least 8, at least 9, at least 10, at least 11, or at least 12 different peptides, wherein each peptide comprises an amino acid sequence selected from the group consisting of SEQ ID Nos: 1 to 2786 and 5432 to 5931.

[0320] 33. The pharmaceutical composition of item 30, wherein the peptides are from different cancer associated antigens selected from Table 24.

[0321] 34. The pharmaceutical composition of item 30, wherein the adjuvant comprises an aluminium salt, saponin, Lipid A, or a water-in-oil emulsion.

[0322] 35. A method of designing or preparing a peptide, or a polynucleic acid or vector that encodes a peptide, or a panel of peptides, or one or more polynucleic acid or vectors that encode a panel of peptides, for use in a method of inducing a T cell response against a target polypeptide, the method comprising
[0323] (i) selecting or defining a model human population comprising a plurality of subjects each defined by HLA class I genotype and/or by HLA class II genotype;
[0324] (ii) identifying for each subject of the model population:
   [0325] (a) amino acid sequences of the target polypeptide that are a T cell epitope capable of binding to at least three HLA class I molecules of the subject;
   [0326] (b) amino acid sequences of the target polypeptide that are a T cell epitope capable of binding to at least three HLA class II molecules of the subject;
   [0327] (c) amino acid sequences of the target polypeptide that comprise a T cell epitope capable of binding to at least three HLA class I molecules of the subject and a T cell epitope capable of binding to at least three HLA class II molecules of the subject; or
   [0328] (d) amino acid sequences of the target polypeptide that both
      [0329] a. are a T cell epitope capable of binding to at least three HLA class II molecules; and
      [0330] b. comprise an amino acid sequence that is a T cell epitope capable of binding to at least three HLA class I molecules of the subject;
[0331] (iii) selecting a polypeptide fragment window length of between 9 and 50 amino acids;
[0332] (iv) identifying a fragment of the target polypeptide that
   [0333] (a) has the length selected in step (iii); and
   [0334] (b) comprises an amino acid sequence identified in any one of step (ii) (a) to (d) in the highest proportion of subjects in the model population; and
[0335] (v) designing or preparing a peptide, a polynucleic acid or vector that encodes a peptide, a panel of peptides, or one or more polynucleic acids or vectors that encode a panel of peptides, wherein each peptide comprises one or more of the target polypeptide fragments identified in step (iv).

[0336] 36. The method of item 35, wherein the polypeptide fragment is flanked at the N and/or C terminus by additional amino acids that are not part of the sequence of the target polypeptide antigen.

[0337] 37. The method of item 35, further comprising (v) testing the fragment identified in step (iv) against additional pre-defined criteria, rejecting the fragment if the further pre-defined criteria are not met, and repeating step (iv) to identify an alternative fragment of the target polypeptide that has the length selected in step (iii); and comprises an amino acid sequence identified in step (iv) in the next highest proportion of subjects in the model population.

[0338] 38. The method of item 37, further comprising repeating step (iv) and step (v) in one or more further rounds, wherein a further fragment of the target polypeptide is identified in each round, and wherein in each round subjects are excluded from the model population if any of the fragments selected in step (iv) and not rejected in step (v) of any of the preceding rounds comprises an amino acid sequence identified in step (ii) for that subject.

[0339] 39. The method according to item 35, wherein the target polypeptide is expressed by pathogenic organism, a virus or a cancer cell, or is a cancer testes antigen, optionally wherein the target polypeptide is selected from the antigens listed in any of Tables 2 to 5.

[0340] 40. The method according to item 35, further comprising selecting two or more peptides, polynucleic acids or vectors designed or prepared according to the method of claim 9 for use in a method of vaccinating, providing immunotherapy to, or inducing a cytotoxic and/or helper T cell response in a subject, wherein each of the two or more peptides or encoded peptides comprises an amino acid sequence that is
[0341] (a) a fragment of a polypeptide that is expressed by a pathogenic organism, a virus or a cancer cell; and
[0342] (b) a T cell epitope capable of binding to at least three HLA class I molecules of the subject or a T cell epitope capable of binding to at least four HLA class II molecules of the subject;
[0343] and wherein the method further comprises administering the one or more peptides, polynucleic acids or vectors to the subject.

### EXAMPLES

### Example 1—HLA-Epitope Binding Prediction Process and Validation

[0344] Predicted binding between particular HLA and epitopes (9 mer peptides) was based on the Immune Epitope Database tool for epitope prediction (www.iedb.org).

[0345] The HLA I-epitope binding prediction process was validated by comparison with HLA class I-epitope pairs determined by laboratory experiments. A dataset was compiled of HLA I-epitope pairs reported in peer reviewed publications or public immunological databases.

[0346] The rate of agreement with the experimentally determined dataset was determined (Table 6). The binding HLA I-epitope pairs of the dataset were correctly predicted with a 93% probability. Coincidentally the non-binding HLA I-epitope pairs were also correctly predicted with a 93% probability.

TABLE 6
Analytical specificity and sensitivity of the HLA-epitope binding
prediction process.

| | True epitopes | False epitopes |
|---|---|---|
| | (n = 327) | (n = 100) |
| HLA-epitope pairs | (Binder match) | (Non-binder match) |
| HIV | 91% (32) | 82% (14) |
| Viral | 100% (35) | 100% (11) |
| Tumor | 90% (172) | 94% (32) |
| Other (fungi, bacteria, etc.) | 100% (65) | 95% (36) |
| All | 93% (304) | 93% (93) |

[0347] The accuracy of the prediction of multiple HLA binding epitopes was also determined (Table 7). Based on the analytical specificity and sensitivity using the 93% probability for both true positive and true negative prediction and 7% (=100%-93%) probability for false positive and false negative prediction, the probability of the existence of a multiple HLA binding epitope in a person can be calculated. The probability of multiple HLA binding to an epitope shows the relationship between the number of HLAs binding an epitope and the expected minimum number of real binding. Per PEPI definition three is the expected minimum number of HLA to bind an epitope (bold).

TABLE 7
Accuracy of multiple HLA binding epitopes predictions.

| Expected | | | | | | | |
|---|---|---|---|---|---|---|---|
| minimum | | | | | | | |
| number of real | Predicted number of HLAs binding to an epitope | | | | | | |
| HLA binding | 0 | 1 | 2 | 3 | 4 | 5 | 6 |
| 1 | 35% | 95% | 100% | 100% | 100% | 100% | 100% |
| 2 | 6% | 29% | 90% | 99% | 100% | 100% | 100% |
| 3 | 1% | 4% | 22% | 84% | 98% | 100% | 100% |
| 4 | 0% | 0% | 2% | 16% | 78% | 96% | 99% |
| 5 | 0% | 0% | 0% | 1% | 10% | 71% | 94% |
| 6 | 0% | 0% | 0% | 0% | 0% | 5% | 65% |

[0348] The validated HLA-epitope binding prediction process was used to determine all HLA-epitope binding pairs described in the Examples below.

### Example 2—Epitope Presentation by Multiple HLA Predicts Cytotoxic T Lymphocyte (CTL) Response

[0349] This study investigates whether the presentation of one or more epitopes of a polypeptide antigen by one or more HLA class I molecule of an individual is predictive for a CTL response.

[0350] The study was carried out by retrospective analysis of six clinical trials, conducted on 71 cancer patients and 9 HIV-infected patients (Table 8). Patients from these studies were treated with an HPV vaccine, three different NY-ESO-1 specific cancer vaccines, one HIV-1 vaccine and a CTLA-4 specific monoclonal antibody (Ipilimumab) that was shown to reactivate CTLs against NY-ESO-1 antigen in melanoma patients. All of these clinical trials measured antigen specific CD8+ CTL responses (immunogenicity) in the study subjects after vaccination. In some cases, correlation between CTL responses and clinical responses were reported.

[0351] No patient was excluded from the retrospective study for any reason other than data availability. The 157 patient datasets (Table 8) were randomized with a standard random number generator to create two independent cohorts for training and evaluation studies. In some cases, the cohorts contained multiple datasets from the same patient, resulting in a training cohort of 76 datasets from 48 patients and a test/validation cohort of 81 datasets from 51 patients.

TABLE 8
Summary of patient datasets

| | | | | | | Immuno- | |
|---|---|---|---|---|---|---|---|
| | | | | | # Data | assay | |
| | | | | | sets | performed | |
| | | | | | (#antigen | in | HLA |
| Clinical | Immuno- | Target | | # | × | the clinical | genotyping |
| trial | therapy | Antigen | Disease | Patients* | #patient) | trials** | method |
| 1 | VGX- | HPV16- | Cervical | 17/18 | 5 × 17 | IFN-γ | High |
| | 3100 | E6 | cancer | | | ELISPOT | Resolution |
| | | HPV16- | | | | | SBT |
| | | E7 | | | | | |
| | | HPV18- | | | | | |
| | | E6 | | | | | |
| | | HPV18- | | | | | |
| | | E7 | | | | | |
| | | HPV16/18 | | | | | |
| 2 | HIVIS | HIV-1 | AIDS | 9/12 | 2 × 9 | IFN-γ | Low-Medium |
| | vaccine | Gag HIV- | | | | ELISPOT | Resolution |
| | | 1 RT | | | | | SSO |
| 3 | rNY- | NY-ESO- | Breast-and | 18/18 | 1 × 18 | In vitro and | High |
| | ESO-1 | 1 | ovarian | | | Ex vivo IFN- | Resolution |
| | | | cancers, | | | γ ELISPOT | SBT |
| | | | melanoma | | | | |
| | | | and sarcoma | | | | |
| 4 | Ipilimumab | NY-ESO- | Metastatic | 19/20 | 1 × 19 | ICS after | Low to |
| | | 1 | melanoma | | | T-cell | medium |
| | | | | | | stimulation | resolution |
| | | | | | | | typing, SSP |
| | | | | | | | of genomic |
| | | | | | | | DNA, high |
| | | | | | | | resolution |
| | | | | | | | sequencing |
| 5 | NY-ESO-1f | NY-ESO- | Esophageal-, | 10/10 | 1 × 10 | ICS after | SSO probing |
| | | 1 (91-110) | non-small- | | | T-cell | and SSP of |
| | | | cell lung- | | | stimulation | genomic |
| | | | and gastric | | | | DNA |
| | | | cancer | | | | |
| 6 | NY-ESO-1 | NY-ESO- | Esophageal- | 7/9 | 1 × 7 | ICS after | SSO probing |
| | overlapping | 1 (79-173) | and lung | | | T-cell | and SSP of |
| | peptides | | cancer, | | | stimulation | genomic |
| | | | melanoma | | | | DNA |
| Total | 6 | 7 | | 80 | 157 | | |

[0352] The reported CD8+ T cell responses of the training dataset were compared with the HLA class I restriction profile of epitopes (9 mers) of the vaccine antigens. The antigen sequences and the HLA class I genotype of each patient were obtained from publicly available protein sequence databases or peer reviewed publications and the HLA I-epitope binding prediction process was blinded to patients' clinical CD8+ T cell response data where CD8+ T cells are IFN-γ producing CTL specific for vaccine peptides (9 mers). The number of epitopes from each antigen predicted to bind to at least 1 (PEPI1+), or at least 2 (PEPI2+), or at least 3 (PEPI3+), or at least 4 (PEPI4+), or at least 5 (PEPI5+), or all 6 (PEPI6) HLA class I molecules of each patient was determined and the number of HLA bound were used as classifiers for the reported CTL responses. The true positive rate (sensitivity) and true negative rate (specificity) were determined from the training dataset for each classifier (number of HLA bound) separately.

[0353] ROC analysis was performed for each classifier. In a ROC curve, the true positive rate (Sensitivity) was plotted in function of the false positive rate (1-Specificity) for different cut-off points (FIG. 1). Each point on the ROC curve represents a sensitivity/specificity pair corresponding to a particular decision threshold (epitope (PEPI) count). The area under the ROC curve (AUC) is a measure of how well the classifier can distinguish between two diagnostic groups (CTL responder or non-responder).

[0354] The analysis unexpectedly revealed that predicted epitope presentation by multiple class I HLAs of a subject (PEPI2+, PEPI3+, PEPI4+, PEPI5+, or PEPI6), was in every case a better predictor of the CD8+ T cell response or CTL response than epitope presentation by merely one or more HLA class I (PEPI1+, AUC=0.48, Table 9).

TABLE 9
Determination of diagnostic value of the
PEPI biomarker by ROC analysis

| Classifiers | AUC |
|---|---|
| PEPI1+ | 0.48 |
| PEPI2+ | 0.51 |
| PEPI3+ | 0.65 |
| PEPI4+ | 0.52 |
| PEPI5+ | 0.5 |
| PEPI6+ | 0.5 |

[0355] The CTL response of an individual was best predicted by considering the epitopes of an antigen that could be presented by at least 3 HLA class I alleles of an individual (PEPI3+, AUC=0.65, Table 9). The threshold count of PEPI3+(number of antigen-specific epitopes presented by 3 or more HLA of an individual) that best predicted a positive CTL response was 1 (Table 10). In other words, at least one antigen-derived epitope is presented by at least 3 HLA class I of a subject (≥1 PEPI3+), then the antigen can trigger at least one CTL clone, and the subject is a likely CTL responder. Using the ≥1 PEPI3+ threshold to predict likely CTL responders (“≥1 PEPI3+ test”) provided 76% true positive rate (diagnostic sensitivity) (Table 10).

TABLE 10
Determination of the ≥1 PEPI3+ threshold to predict likely CTL
responders in the training dataset.
PEPI3+ Count

| | 1 | 2 | 3 | 4 | 5 | 6 | 7 | 8 | 9 | 10 | 11 | 12 |
|---|---|---|---|---|---|---|---|---|---|---|---|---|
| Sensitivity: | 0.76 | 0.60 | 0.31 | 0.26 | 0.14 | 0.02 | 0 | 0 | 0 | 0 | 0 | 0 |
| 1-Specificity: | 0.59 | 0.24 | 0.21 | 0.15 | 0.09 | 0.06 | 0.06 | 0.03 | 0.03 | 0.03 | 0.03 | 0.03 |

### Example 3—Retrospective Validation of the ≥1 PEPI3+ Threshold as Novel Biomarker for PEPI Test

[0356] In a retrospective analysis, the test cohort of 81 datasets from 51 patients was used to validate the ≥1 PEPI3+ threshold to predict an antigen-specific CD8+ T cell response or CTL response. For each dataset in the test cohort it was determined whether the ≥1 PEPI3+ threshold was met (at least one antigen-derived epitope presented by at least three class I HLA of the individual). This was compared with the experimentally determined CD8+ T cell responses (CTL responses) reported from the clinical trials (Table 11).

[0357] The retrospective validation demonstrated that a PEPI3+ peptide induces CD8+ T cell response (CTL response) in an individual with 84% probability. 84% is the same value that was determined in the analytical validation of the PEPI3+ prediction, epitopes that binds to at least 3 HLAs of an individual (Table 7). These data provide strong evidences that immune responses are induced by PEPIs in individuals.

TABLE 11
Diagnostic performance characteristics of the ≥1 PEPI3+ test (n = 81).

| Performance characteristic | | Description | Result |
|---|---|---|---|
| Positive | 100%[A/(A + B)] | The likelihood that an individual that meets the | 84% |
| predictive | | ≥1 PEPI3+ threshold has antigen-specific CTL | |
| value (PPV) | | responses after treatment with immunotherapy. | |
| Sensitivity | 100%[A/(A + C)] | The proportion of subjects with antigen-specific | 75% |
| | | CTL responses after treatment with | |
| | | immunotherapy who meet the ≥1 PEPI3+ | |
| | | threshold. | |
| Specificity | 100%[D/(B + D)] | The proportion of subjects without antigen- | 55% |
| | | specific CTL responses after treatment with | |
| | | immunotherapy who do not meet the ≥1 PEPI3+ | |
| | | threshold. | |
| Negative | 100%[D/(C + D)] | The likelihood that an individual who does not | 42% |
| predictive | | meet the ≥1 PEPI3+ threshold does not have | |
| value | | antigen-specific CTL responses after treatment | |
| (NPV) | | with immunotherapy. | |
| Overall | 100%[(A + D)/N] | The percentage of predictions based on the ≥1 | 70% |
| percent | | PEPI3+ threshold that match the experimentally | |
| agreement | | determined result, whether positive or negative. | |
| (OPA) | | | |
| Fisher's | | | 0.01 |
| exact (p) | | | |

[0358] ROC analysis determined the diagnostic accuracy, using the PEPI3+ count as cut-off values (FIG. 2). The AUC value=0.73. For ROC analysis an AUC of 0.7 to 0.8 is generally considered as fair diagnostic value.

[0359] A PEPI3+ count of at least 1 (≥1 PEPI3+) best predicted a CTL response in the test dataset (Table 12). This result confirmed the threshold determined during the training (Table 9).

TABLE 12
Confirmation of the ≥1 PEPI3+ threshold to predict likely CTL
responders in the test/validation dataset.
PEPI3+ Count

| | 1 | 2 | 3 | 4 | 5 | 6 | 7 | 8 | 9 | 10 | 11 | 12 |
|---|---|---|---|---|---|---|---|---|---|---|---|---|
| Sensitivity: | 0.75 | 0.52 | 0.26 | 0.23 | 0.15 | 0.13 | 0.08 | 0.05 | 0 | 0 | 0 | 0 |
| 1-Specificity: | 0.45 | 0.15 | 0.05 | 0 | 0 | 0 | 0 | 0 | 0 | 0 | 0 | 0 |

### Example 4—Clinical Validation of the ≥1 PEPI3+ Threshold as Novel Biomarker for PEPI Test

[0360] The PEPI3+ biomarker-based vaccine design has been tested first time in a phase I clinical trial in metastatic colorectal cancer (mCRC) patients in the OBERTO phase I/II clinical trial (NCT03391232). In this study, we evaluated the safety, tolerability and immunogenicity of a single or multiple dose(s) of PolyPEPI1018 as an add-on to maintenance therapy in subjects with mCRC. PolyPEPI1018 is a peptide vaccine containing 12 unique epitopes derived from 7 conserved TSAs frequently expressed in mCRC (WO2018158455 A1). These epitopes were designed to bind to at least three autologous HLA alleles that are more likely to induce T-cell responses than epitopes presented by a single HLA (See Examples 2 & 3). mCRC patients in the first line setting received the vaccine (dose: 0.2 mg/peptide) just after the transition to maintenance therapy with a fluoropyrimidine and bevacizumab. Vaccine-specific T-cell responses were first predicted by identification of PEPI3+-s in silico (using the patient's complete HLA genotype and antigen expression rate specifically for CRC) and then measured by ELISpot after one cycle of vaccination (phase I part of the trial).

[0361] Seventy datasets from 10 patients (Phase 1 cohort and dataset of OBERTO trial) was used to prospectively validate that PEPI3+ biomarker predicts antigen-specific CTL responses. For each dataset, predicted PEPI3+-s were determined in silico and compared to the vaccine-specific immune responses measured by ELISPOT assay from the patients' blood. Diagnostic characteristics (positive predictive value, negative predictive value, overall percent agreement) determined this way were then compared with the retrospective validation results described in Example 3.

[0362] The overall percent agreement was 64%, with high positive predictive value of 79%, representing 79% probability that the patient with predicted PEPI3+ will produce CD8 T cell specific immune response against the analyzed antigen. Clinical trial data were significantly correlated with the retrospective trial results (p=0.01) and provides evidence for the PEPI3+ calculation with PEPI test to predict antigen-specific T cell responses based on the complete HLA-genotype of patients (Table 13).

TABLE 13
Prospective validation of the ≥1 PEPI3+ and PEPI test

| | | | Prospective |
|---|---|---|---|
| | | Retrospective | validation |
| | | validation | (OBERTO) |
| Parameter | Definition | n = 81* | n = 70** |
| PPV | The likelihood that an | 84% | 79% |
| Positive | individual with a positive | | |
| Predictive | PEPI test result has | | |
| Value | antigen-specific T cell | | |
| | responses | | |
| NPV | The likelihood that an | 42% | 51% |
| Negative | individual with a negative | | |
| Predictive | PEPI test result does not | | |
| Value | have antigen-specific | | |
| | T cell responses | | |
| OPA | The percentage of results | 70% | 64% |
| Overall Percent | that are true results, | | |
| Agreement | whether positive or | | |
| | negative | | |
| Fisher's exact | | 0.01 | 0.01 |
| probability test | | | |
| (p) | | | |

*51 patients; 6 clinical trials; 81 dataset
**10 patients; Treos phase I clinical trial (OBERTO); 70 datasets

### Example 5—the ≥1 PEPI3+ Test Predicts CD8+ T Cell Reactivities

[0363] Supporting data were obtained to show that the ≥1 PEPI3+ correlates with clinical immunogenicity data but the state-of-art mono-HLA specific epitope determination does not show correlation with vaccine-specific immunogenicity.

[0364] The ≥1 PEPI3+ calculation was compared with a state-of-art method for predicting a specific human subject's CTL response to peptide antigens.

The HLA genotypes of 28 cervical cancer and VIN-3 patients that received HPV-16 specific synthetic long peptide vaccine (LPV) in two different clinical trials were determined from DNA samples. The LPV consists of long peptides covering the HPV-16 viral oncoproteins E6 and E7. The amino acid sequence of the LPV was obtained from M. J. Welters, et al. Induction of tumor-specific CD4+ and CD8+ T-cell immunity in cervical cancer patients by a human papillomavirus type 16 E6 and E7 long peptides vaccine. Clin Cancer Res 14, 178-187 (2008)., G. G. Kenter, et al. Vaccination against HPV-16 oncoproteins for vulvar intraepithelial neoplasia. N Engl J Med 361, 1838-1847 (2009). M. J. Welters, et al. Success or failure of vaccination for HPV16-positive vulvar lesions correlates with kinetics and phenotype of induced T-cell responses. Proc Natl Acad Sci USA 107, 11895-11899 (2010). The publications also report the T cell responses of each vaccinated patient to pools of overlapping peptides of the vaccine. 25 (20 having VIN-3 and 5 having cervical cancer) patients had immune response data available, and 25 had clinical response data available.

[0365] For each patient, epitopes (9 mers) of the LPV that are presented by at least three patient class I HLA (PEPI3+s) were identified and their distribution among the peptide pools was determined. Peptides that comprised at least one PEPI3+(≥1 PEPI3+) were predicted to induce a CD8+ T cell response. Peptides that comprised no PEPI3+ were predicted not to induce a CD8+ T cell response.

[0366] The ≥1 PEPI3+ threshold correctly predicted 529 out of 555 negative CD8+ T cell responses (95% true negative (TN) rate) and 9 out of 45 positive CD8+ T cell responses (20% true positive (TP) rate) measured after vaccination (FIG. 3A). Overall, the agreement between the ≥1 PEPI3+ threshold and experimentally determined CD8+ T cell reactivity was 90% (p<0.001). For each patient the distribution among the peptide pools of epitopes that are presented by at least one patient class I HLA (≥1 PEPI1+, HLA restricted epitope prediction, prior art method) was also determined. Forty-two HLA class I binding epitopes predicted 45 CD8+ T cell responses (93% TP rate). In contrast, of the 555 negative T cell responses, only 105 were ruled out by HLA binding epitopes (19% TN rate) (FIG. 3B). Overall, the agreement between a single HLA class I allele binding epitope and CD8+ T cell response was 25%, which was not statistically significant.

### Example 6—Prediction of HLA Class II Restricted CD4+ Helper T Cell Epitopes

[0367] The 28 cervical cancer and VIN-3 patients that received the HPV-16 synthetic long peptide vaccine (LPV) in two different clinical trials (as detailed in Example 5) were investigated for CD4+ T helper responses following LPV vaccination (FIGS. 4A-B). The TP rate of the prediction of HLA class II restricted epitopes was 95%, since the State of Art tool predicted 112 positive responses (positive CD4+ T cell reactivity to a peptide pool for a person's HLA class II alleles) out of 117. The TN rate was 0% since it could rule out 0 of 33 negative T cell responses. Overall, the agreement between HLA-restricted class II PEPI prediction and CD4+ T cell reactivity was 75% (not significant).

The HLA class II-binding PEPI3+-s predicted 86 of 117 positive CD4+ T-cell responses (73% TP rate) and ruled out 17 of 33 negative T-cell responses (52% TN rate). Overall, the agreement between HLA class II PEPI3+-s and CD4+ T-cell response was 69% (p=0.005) (FIG. 4A).

### Example 7—the ≥1 PEPI3+ Test Predicts T Cell Responses to Full Length LPV Polypeptides

[0368] Using the same studies as reported in Examples 5 and 6, the ≥1 PEPI3+ test was used to predict patient CD8+ and CD4+ T cell responses to the full length E6 and E7 polypeptide antigens of the LPV vaccine. Results were compared to the experimentally determined responses reported. The test correctly predicted the CD8+ T cell reactivity (PEPI3+) of 11 out of 15 VIN-3 patients with positive CD8+ T cell reactivity test results (sensitivity 70%, PPV 85%) and of 2 out of 5 cervical cancer patients (sensitivity 40%, PPV 100%) (FIG. 5A). The CD4+ T cell reactivities (PEPI3+) were correctly predicted 100% both of VIN-3 and cervical cancer patients (FIG. 5B). Class I and class II HLA restricted PEPI3+ count was also observed to correlate with the reported clinical benefit to LPV vaccinated patients. Patients with higher PEPI3+ counts had either complete or partial response already after 3 months. There was also a correlation between the number of PEPIs and clinical response in VIN-3 patients for HLA class II PEPIs but not HLA class I PEPIs, confirming the post-hoc analysis results from the clinical trial (FIGS. 5C and 5D).

### Example 8—Case Study, PEPI3+ Correlation with Vaccine-Specific Immunogenicity

[0369] “Vaccine-1” is an HPV16 based DNA vaccine containing full length E6 and E7 antigens with a linker in between. “Vaccine-2” is an HPV18 based DNA vaccine containing full length E6 and E7 antigens with a linker in between (FIG. 6A). A Phase II clinical trial investigated the T cell responses of 17 HPV-infected patients with cervical cancer who were vaccinated with both “Vaccine-1” and “Vaccine-2” (“Vaccine-3” vaccination, Bagarazzi et al. Science Translational Medicine. 2012; 4(155):155ra138.).

[0370] FIG. 6B shows for two illustrative patients (patient 12-11 and patient 14-5) the position of each epitope (9 mer) presented by at least 1 (PEPI1+), at least 2 (PEPI2+), at least 3 (PEPI3+), at least 4 (PEPI4+), at least 5 (PEPI5+), or all 6 (PEPI6) class I HLA of these patients within the full length sequence of the two HPV-16 and two HPV-18 antigens.

[0371] Patient 12-11 had an overall PEPI1+ count of 54 for the combined vaccines (54 epitopes presented by one or more class I HLA). Patient 14-5 had a PEPI1+ count of 91. Therefore, patient 14-5 has a higher PEPI1+ count than patient 12-11 with respect to the four HPV antigens. The PEPI1+s represent the distinct vaccine antigen specific HLA restricted epitope sets of patients 12-11 and 14-5. Only 27 PEPI1+s were common between these two patients. For the PEPI3+ counts (number of epitopes presented by three or more patient class I HLA), the results for patients 12-11 and 14-5 were reversed. Patient 12-11 had a PEPI3+ count of 8, including at least one PEPI3+ in each of the four HPV16/18 antigens. Patient 14-5 had a PEPI3+ count of 0 (FIG. 6C).

[0372] The reported immune responses of these two patients matched the PEPI3+ counts, not the PEPI1+ counts. Patient 12-11 developed immune responses to each of the four antigens post-vaccination as measured by ELISpot, whilst patient 14-5 did not develop immune responses to any of the four antigens of the vaccines. A similar pattern was observed when the PEPI1+ and PEPI3+ sets of all 17 patients in the trial were compared. There was no correlation between the PEPI1+ count and the experimentally determined T cell responses reported from the clinical trial. However, correlation between the T cell immunity predicted by the ≥1 PEPI3+ test and the reported T cell immunity was observed. The ≥1 PEPI3+ test predicted the immune responders to HPV DNA vaccine.

[0373] Moreover, the diversity of the patient's PEPI3+ set resembled the diversity of T cell responses generally found in cancer vaccine trials. Patients 12-3 and 12-6, similar to patient 14-5, did not have PEPI3+s predicting that the HPV vaccine could not trigger T cell immunity. All other patients had at least one PEPI3 predicting the likelihood that the HPV vaccine can trigger T cell immunity. 11 patients had multiple PEPI3+ predicting that the HPV vaccine likely triggers polyclonal T cell responses. Patients 15-2 and 15-3 could mount high magnitude T cell immunity to E6 of both HPV, but poor immunity to E7. Other patients 15-1 and 12-11 had the same magnitude response to E7 of HPV18 and HPV16, respectively.

### Example 9—Design of a Model Population for Conducting in Silico Trials and Identifying Candidate Precision Vaccine Targets for Large Population

[0374] An in silico human trial cohort of 433 subjects with complete 4-digit HLA class I genotype (2×HLA-A*xx:xx; 2×HLA-B*xx:xx; 2×HLA-C*xx:xx) and demographic information was compiled. This Model Population has subjects with mixed ethnicity having a total of 152 different HLA alleles that are representative for >85% of presently known allele G-groups.

[0375] A database of a “Big Population” containing 7,189 subjects characterized with 4-digit HLA genotype and demographic information was also established. The Big Population has 328 different HLA class I alleles. The HLA allele distribution of the Model Population significantly correlated with the Big Population (Table 14) (Pearson p<0.001). Therefore, the 433 patient Model Population is representative for a 16 times larger population. The Model Population is representative for 85% of the human race as given by HLA diversity as well as HLA frequency.

TABLE 14
Statistical analysis of HLA distributions in “Model Population” vs.
“Big Population”.

| Group | Group | Pearson R | | |
|---|---|---|---|---|
| name 1 | name 2 | value | Correlation | P Value |
| 433 Model | 7,189 Big | 0.89 | Strong | P < 0.001 |
| Population | Population | | | |

### Example 10—in Silico Trial Based on the Identification of Multiple HLA Binding Epitopes in a Multi-Peptide Vaccine IMA901 Predict the Reported Clinical Trial Immune Response Rate

### Probability of Targeting Multiple Antigens in the Tumor of RCC Patients

[0376] IMA901 is a therapeutic vaccine for renal cell cancer (RCC) comprising 9 peptides derived from tumor-associated antigens (TUMAPs). It was demonstrated that TUMAPs are naturally presented in human cancer tissue, they are overexpressed antigens shared by a subset of patients with the given cancer entity (Table 15). We estimated the probability that a TSA is expressed in a subject treated with IMA901 vaccine using available data from the scientific literature (FIG. 7). We used the Bayesian convention assuming that the expression probabilities follow a Beta-distribution.

[0377] We defined AG50 as the number of TSAs (AG) in the cancer vaccine that a specific tumor type expresses with 50% probability. The AG50 modelling of cancer vaccines assumes that each AG produces an effect proportional to the expression rate of the AG in the tumor type (if each AG in the vaccine is immunogenic).

[0378] For IMA901 vaccine targeting 9 antigens (9 TUMAPs), the AG50 value is 4.7, meaning that about half of the antigens are overexpressed in 50% of patients' tumor. Moreover, the probability of targeting 2 expressed antigens is 100% and 3 antigens is 96%. These results suggest high potency of IMA901 vaccine based on target antigen selection.

TABLE 15
Overexpression of TAAs in RCC tumors selected for IMA901 vaccine

| | Published expression rate | Estimated expression | |
|---|---|---|---|
| TAA (AG) | in RCC tumors* | rate (95% CI) | |
| ADF-001 | 5/11¹ | 46% | (21%, 72%) |
| ADF-002 | 5/11 | 46% | (21%, 72%) |
| APO-001 | 9/11² | 77% | (52%, 95%) |
| CCN-001 | 4/11 | 38% | (15%, 65%) |
| GUC-001 | 0/2² | 25% | (1%, 71%) |
| K67-001 | 2/2 | 75% | (29%, 99%) |
| MET-001 | 11/11 | 92% | (74%, 100%) |
| MUC-001 | 0/11 | 8% | (0%, 26%) |
| RGS-001 | 7/11 | 62% | (35%, 85%) |

*expression is defined as overexpression in tumors compared to healthy tissues provided in the source publications
¹Walter S et al, Multipeptide immune response to cancer vaccine IMA901 after single-dose cyclophosphamide associates with longer patient survival, Nature Medicine, (2012), 18, 1254-1261
²Krüger T et al, Lessons to be learned from primary renal cell carcinomas, Cancer Immunol, Immunother, 2005, 54, 826-836

### Probability of Inducing Immune Responses Against Multiple Antigens in the Tumor of RCC Patients

[0379] A total of 96 HLA-A*02+ subjects with advanced RCC were treated with IMA901 in two independent clinical studies (Phase I and Phase II) (Walter S et al, Multipeptide immune response to cancer vaccine IMA901 after single-dose cyclophosphamide associates with longer patient survival, Nature Medicine, (2012), 18, 1254-1261). Each of the 9 peptides in IMA901 have been identified as HLA-A*02-restricted epitopes. Based on currently accepted standards, all 9 peptides are strong candidates to boost T cell responses against renal cancer since their presence has been detected in renal cancer patients, and because the trial patients were specifically selected to have at least one HLA molecule (HLA-A*02) capable of presenting each of the peptides. Despite this restriction the immune response rate of the phase I and phase II clinical trials measured for at least one peptide of the vaccine was 74% and 64%, respectively. We analyzed by in silico prediction the HLA binding properties of each TUMAP in IMA901 and found that 8 out of the 9 TUMAPs can bind to many HLA-A*02 alleles confirming the identification process (FIGS. 8A-B). However, we found that each TUMAP can bind to many other HLA-B* and HLA-C* alleles (FIG. 8A).

[0380] Since the complete 4-digit HLA genotype of subjects who participated in IMA901 clinical trials were not available, we used the genotype data of 51 HLA-A*02 selected RCC subjects from another clinical trial, to characterize the immunogenicity of IMA901 vaccine (REF: Chowell D, Morris L G T, Grigg C M, Weber J K, Samstein R M, et al. Patient HLA class I genotype influences cancer response to checkpoint blockade immunotherapy. Science. 2018; 359 (6375): 582-587.). As presented on FIG. 8B, only few TUMAPs are able to bind to multiple HLAs of the same subject. The most immunogenic peptide in this context turned to be MET-001 capable of generating PEPI in 35% of RCC patients. However, CCN-001 could not generate PEPI in any of the patients, in agreement with FIG. 8A; CCN-001 can bind only to HLA-A*02 alleles. Based on FIG. 8A, MUC-001 is theoretically able to bind other alleles, too (both HLA-B and HLA-C), however those alleles were not present in the patients of our model population, therefore this peptide could not generate PEPI, either.

[0381] The immunogenicity of IMA901 vaccine determined in the 2 clinical trials was compared with the PEPI response rate determined using the PEPI test in our RCC model population. We found 67% (CI95 53-78%) immune response to at least one peptide of the IMA901 vaccine. According to PEPI test, 33% (CI95 22-47%) of these HLA-A*02+ subjects did not have 3 HLAs binding to any TUMAPs. Interestingly, IMA901 did not induce T cell responses in 25% and 36% of HLA-A*02 selected subjects in the Phase I and Phase II clinical trials, respectively. Furthermore, PEPI test predicted 30% (CI95 19-43%) of subjects with 1 PEPI to one TUMAP, and 37% (CI95 25-51%) have ≥2 PEPIs to at least two IMA901 peptides, which is in agreement with the average 40% and 27% immune response to 1 or ≥2 TUMAPs in both clinical trials (Table 16). The differences between the immunogenicity found in the 3 cohorts can be explained by the differences in the HLA genotype of the study subjects as well as the potential errors in measuring T cell responses and in determining PEPIs with the PEPI test (see Example 1). The phase I and phase II study results show the variability of the immune response rates of the same vaccine in different trial cohorts. However, the agreements between PEPI response rates and immunogenicity of peptide vaccines are determined by the host HLA sequences.

TABLE 16
Immunogenicity of IMA901 vaccine is determined by the host HLA
genotype (multiple HLAs)

| | | | | | RCC model | |
|---|---|---|---|---|---|---|
| Immune | | | | | population | |
| responses to | | Phase I | Phase II | Phase I + II | (n = 51)** | |
| TUMAPs | | (n = 27)* | (n = 61)* | (n = 88) | (CI95%) | |
| No peptide | | 25% | 36% | 33% | 33% | (22-47%) |
| ≥1 | peptide | 74% | 64% | 67% | 67% | (53-78%) |
| 1 | peptide | 44% | 38% | 40% | 30% | (19-43%) |
| ≥2 | peptides | 29% | 26% | 27% | 37% | (25-51%) |

*reported immunological data for the trials conducted with IMA901vaccine (REF: Walter Nat Med 2012);
**Predicted by PEPI test

[0382] Similarly to the AG50, we defined AP50 as the average number of antigens with PEPI of a vaccine which shows how the vaccine can induce immune response against the antigens targeted by the composition (cancer vaccine specific immune response). AP, therefore is depending of the HLA heterogeneity of the analyzed population and is independent on the expression of the antigen on the tumor. The IMA901 composition can induce immune response against an average of 1.06 vaccine antigens (AP50=1.06) meaning that in the HLA-A*02 selected RCC model population it can induce immune response against at least one vaccine antigen. This result is far less compared to the designed intention of immunogenicity (HLA-matched patients treated with 9 peptides).

### Comparison of Immunogenicity and Clinical Response of TUMAPs in the IMA901 Peptide Vaccine

[0383] An immune response induced by a vaccine against a single antigen might not be sufficient for clinical activity, as the given antigen might not be expressed in the patient. Therefore, we defined AGP as the immune response which targets an expressed antigen, taking into account both the immunogenicity and expression probability of the vaccine antigen on the tumor, presented above. AGP depends on the antigen (AG) expression rate in the indicated tumor and the HLA genotype of subjects capable to make PEPI (P) in the study population.

Therefore, we investigated the correlation between immune responses against different number of antigens (TUMAPs) and the immune responses against likely expressed antigens (AGP). We found that an immune response elicited by one peptide (1 TUMAP) corresponds to 0.98 AGP, meaning that there is 98% probability that the immune response induced by any peptide of the IMA901 vaccine will target an expressed antigen on the tumor (FIG. 9). However, immune responses elicited by 2 or 3 TUMAPs correspond to only 1.44 and 2.21 AGP, respectively. 0.35 AGP corresponding to 0 TUMAP indicates the cumulated error of PEPI test prediction (see Example 1).

[0384] characterize the potency of a cancer vaccine we defined AGP50, a parameter showing the number of antigens that the vaccine induced CTLs can recognize in a tumor with 50% probability. The computation is similar to the AG50 but in addition to the expression, the occurrence of the PEPI presentation on certain vaccine antigen is also considered. AGP50 for IMA901 vaccine for the RCC model population is 1.10.

[0385] In a retrospective analysis, IMA901 clinical trial investigators found that significantly more subjects who responded to multiple TUMAPs of IMA901 experienced disease control (DC, stable disease or partial response) compared with subjects who had no response or responded to only 1 TUMAP (Table 17). Since the presence of PEPIs accurately predicted the responders to TUMAPs, we investigated the relationship between disease control rate in the TUMAP responder subpopulation and AGP. Similarly, to the investigators we analyzed the percentage of patients who are likely to have immune response against an expressed antigen (i.e.: ≥1 AGP) for the subpopulations predicted to have immune response to 0, 1 or 2 TUMAPs using our RCC model population. Interestingly, percentage of patients with 1 AGP is similar to the percentage of patients with disease control in the subpopulations: i.e.: 33% of patients had disease control vs 47% (CI95 23-67%) had 1 AGP and considerably more patients had disease control and AGP in the subgroup with immune response to 2 TUMAPs 75% vs 90% (CI95 70, 97%), respectively. These results suggest that only those patients are likely to experience clinical benefit, who have immune response against at least one expressed tumor antigen. Moreover, the percentage of patients with 1 AGP in our RCC model population is similar to the disease control rate of the phase I and phase II trials conducted with IMA901 vaccine (Table 17).

TABLE 17
Correlation between clinical benefit and AGP

| | % of pts with DC | | |
|---|---|---|---|
| | in the clinical | % pts with 1 AGP in the | |
| Subpopulation | subpopulation | model subpopulation (CI95) | |
| No IR | 14% | 5% | (0%, 18%) |
| IR to 1 TUMAP | 33% | 47% | (23%, 67%) |
| IR to ≥2 TUMAPs | 75% | 90% | (70%, 97%) |
| Phase I | 40% | 49% | (35%, 61%) |
| Phase II | 31% | | |

### Analysis of IMA901 Vaccine Potency in Multiple Populations

[0386] As shown in Table 18, AG50 value of 4.7 was observed for IMA901 vaccine, suggesting high potency based on target antigen selection. However, AP50 for IMA901 in both the unselected general population and HLA-A*02 selected subjects were only 0.75 and 1.12, respectively. Similar results were obtained for unselected RCC model population and HLA-A*02 selected populations. This results demonstrate that HLA-A*02 enrichment improved the antigenicity of IMA901, however did not ensure the immunogenicity of the vaccine. Consequently, the AGP50 values describing the potency of the vaccine are low in each population.

TABLE 18
Potency of IMA901 vaccine in in unselected population and
HLA-A*02 selected subjects

| Model Population | AG50 | AP50 | AGP50 |
|---|---|---|---|
| All Subjects (n = 433) | 4.7 | 0.75 | 0.49 |
| HLA-A*02 Subjects (n = 180) | 4.7 | 1.12 | 0.81 |
| RCC population (n = 129) | 4.7 | 0.61 | 0.70 |
| RCC subpopulation A*02 (n = 51) | 4.7 | 1.06 | 1.10 |

### Example 11—in Silico Trials Based on the Identification of Multiple HLA Binding Epitopes Predict the Reported T Cell Response Rates of Clinical Trials

[0387] The objective of this study was to determine whether a model population, such as the one described in Example 9, may be used to predict CTL reactivity rates of vaccines, i.e. used in an in silico efficacy trial and to determine the correlation between the clinical outcome of vaccine trials and PEPI.

[0388] Published clinical trial results were collected from studies with therapeutic vaccines, which included 1,790 subjects in 64 clinical studies, treated with 42 therapeutic vaccines covering 61 different antigens (Table 19). The same vaccines used in those clinical trials were used to perform in silico trials with the model population of 433 human leukocyte antigen (HLA)-genotyped subjects (described in Example 9). No subjects were excluded for reasons other than data availability. IRR was defined as the proportion of subjects in the study population with T cell responses induced by the study vaccine. ORR was defined as the proportion of subjects in the study population with objective response (complete and partial response) after vaccination. The proportion of subjects with PEPIs (personal epitopes that bind to 3 HLA alleles of a subject), multiple PEPIs, and PEPIs in multiple antigens were computed in the in silico trials to obtain the PEPI Score, MultiPEPI Score, and MultiAgPEPI Score, respectively. The immune and objective response rates (IRR and ORR) from the published clinical trials were compared with the PEPI Score, MultiPEPI Score, and MultiAgPEPI Score. All reported and calculated scores are summarized in Table 20.

TABLE 19
Summary of patient demographics in the published clinical trials

| Characteristic | Count | Percentage |
|---|---|---|
| Total subjects | 1,790 | |
| Total studies | 64 | |
| Subjects with HIV infection | 12 | 1% |
| Subjects with neoplasia or dysplasia | 172 | 9% |
| Subjects with cancer | 1606 | 90% |
| Subjects with solid tumors | 1503 | 84% |
| Subjects with liquid tumors | 103 | 6% |
| Subjects with metastatic tumors | 788 | 44% |
| Subjects with non-metastatic tumors | 818 | 46% |
| HLA selected subjects | 918 | 51% |
| Non- HLA selected subjects | 872 | 49% |
| Trials with HLA selected subjects | 32 | 50% |
| Trials without HLA selected subjects | 32 | 50% |

TABLE 20
Response rates and PEPI Scores

| | | | | Multi | MultiAg |
|---|---|---|---|---|---|
| | | | PEPI | PEPI | PEPI |
| Immunotherapy | IRR | ORR | Score | Score | Score |
| PSMA-Survivin pulsed DC | — | 18% | 3% | 0% | 0% |
| vaccine | | | | | |
| Peptide vaccine | — | 3% | 10% | 0% | 0% |
| HPV-SLP | 83% | 60% | 73% | 70% | 34% |
| | 100% | 60% | 73% | 70% | 34% |
| VGX-3100 | 78% | 50% | 87% | 56% | 64% |
| Melanoma peptide vaccine | 52% | 12% | 42% | 6% | 6% |
| GAA peptides vaccine | 55% | 15% | 18% | 0% | 0% |
| KRM-20 peptide vaccine | 40% | 13% | 36% | 15% | 15% |
| Peptide vaccine | 100% | 25% | 81% | 3% | 1% |
| S-288310 peptide vaccine | 67% | 17% | 44% | 8% | 8% |
| KIF20A-66 peptide | 70% | 26% | 38% | 7% | — |
| PepCan | 65% | 52% | 62% | 26% | — |
| Iplilimumab (NYESO-1 | 72% | 25% | 84% | 65% | — |
| specific response) | | | | | |
| p53 SLP70-248 | 88% | 0% | 77% | 52% | — |
| | 100% | 0% | 77% | 52% | — |
| | 0% | — | 77% | 52% | — |
| p53 SLP70-235 | 21% | — | 75% | 52% | — |
| GVX301 | 64% | 0% | 65% | 7% | — |
| TroVax vaccine (OXB-301) | 65% | 0% | 94% | 83% | — |
| | 57% | 0% | 94% | 83% | — |
| StimuVax | 21% | — | 2% | — | — |
| IMA901 | 74% | — | 48% | 27% | 27% |
| | 64% | — | 48% | 27% | 27% |
| ICT107 | 33% | — | 52% | — | — |
| ProstVac | 67% | — | 50% | 23% | — |
| | 45% | — | 50% | 23% | — |
| | 76% | — | 50% | 23% | — |
| | 67% | — | 50% | 23% | — |
| | 50% | — | 50% | 23% | — |
| | 72% | — | 50% | 23% | — |
| Synchrotopc TA2M | 46% | — | 24% | 7% | — |
| MELITAC 12.1 | 49% | — | 47% | 19% | — |
| HIVIS | 50% | — | 88% | — | — |
| | 80% | — | 93% | — | — |
| ImMucin | 90% | — | 95% | 70% | — |
| | 100% | 47% | 95% | 70% | — |
| NY-ESO-1 OLP | 71% | — | 84% | 65% | — |
| | 82% | 0% | 84% | 65% | — |
| WT1 vaccine | 83% | — | 80% | 77% | — |
| WT1 peptide vaccine | 72% | 6% | 86% | — | — |
| RHAMM-R3 peptide vaccine | 44% | 0% | 0% | — | — |
| GMMG-MM5 peptides | 35% | — | 86% | 21% | 21% |
| INGN-225 p53 vaccine | 58% | 4% | 82% | 61% | — |
| HR2822 | 8% | — | 3% | — | — |
| GV1001 | 17% | — | 3% | — | — |
| | 45% | — | 3% | — | — |
| Vx-001 | 51% | — | 33% | — | — |
| | 66% | 7% | 33% | — | — |
| | 58% | 4% | 33% | — | — |
| | 71% | 0% | 33% | — | — |
| NY-ESO-1f | 90% | 0% | 55% | 18% | — |
| GL-08I7 (MAGE-A3 Trojan) | 33% | — | 29% | 3% | — |
| | 57% | 0% | 29% | 3% | — |
| | 0% | 0% | 29% | 3% | — |
| DPX0907 (per peptide) | 0% | — | 22% | — | — |
| | 11% | — | 18% | — | — |
| | 11% | — | 7% | — | — |
| | 11% | — | 39% | — | — |
| | 17% | — | 12% | — | — |
| | 17% | — | 5% | — | — |
| | 22% | — | 31% | — | — |
| CV9103 mRNA vaccine | 80% | — | 100% | — | — |
| TG4010 vaccine | 38% | 13% | 43% | 6% | — |
| | 26% | 0% | 43% | 6% | — |
| | 21% | — | 43% | 6% | — |
| | — | 0% | — | — | — |
| SVN-2B peptide vaccine | 60% | — | 35% | — | — |
| TSPP peptide vaccine | — | 5% | 72% | 31% | — |
| Her2/neu peptide vaccine (p369) | 62% | — | 4% | — | — |
| Her2/neu peptide vaccine (p688) | 31% | — | 1% | — | — |
| Her2/neu peptide vaccine (p971) | 54% | — | 0% | — | — |
| MART-1 Peptide Vaccine | 15% | — | 0% | — | — |

[0389] We investigated the correlation between ≥1 PEPI3+ Score and immune response rate in a previous study of 12 peptide vaccines derived from cancer antigens that induced T cell responses in a subpopulation of 172 subjects from 19 clinical trials, that were identified from peer reviewed publications. The experimentally determined response rates reported from the trials were compared with the ≥1 PEPI3+ Scores and linear correlation between ≥1 PEPI3+ Score and response rate (R²=0.70) was found (p=0.001) (FIG. 10A). The correlation between ≥1 PEPI3+ Score and immune response rate was then confirmed by the analysis of 59 clinical trials involving 1,343 subjects who were treated with 40 different vaccines. Each vaccine was analyzed by comparing the published IRR from the clinical trial to the PEPI Score from the model population (FIG. 10B). The correlation between the IRR and PEPI Score was significant (r²=0.465 and p=0.001). This result demonstrated that the PEPI Score determined by in silico trials in the MP accurately predicts the IRRs observed in clinical trials.

[0390] To test whether polyclonal T cell response increases the likelihood of tumor shrinkage, ORR and MultiPEPI Score were compared. Preliminary experiments analyzed the relationship between clinical response (either ORR or DCR) and MultiPEPI Score in 17 clinical trials conducted with peptide- and DNA-based immunotherapy vaccines. The results from these experiments demonstrated a significant correlation between clinical response rate and MultiPEPI Score (r²=0.75, p<0.001). To confirm these findings, ORR data from 27 clinical trials with 21 different vaccines, involving 600 subjects, were collected and analyzed (Error! Reference source not found.). The MultiPEPI Score was calculated as the percentage of subjects in the model population with multiple PEPIs from the study vaccine. The results from this experiment demonstrated that ORR does not correlate with MultiPEPI Score (Error! Reference source not found.).

[0391] Results from previous studies suggested that T cell responses against multiple antigens were associated with longer progression free- and overall survival. Consequently, we hypothesized that the induction of T cell responses against multiple tumor antigens increases the likelihood of tumor shrinkage. To test this hypothesis, ORR data from 10 clinical trials conducted with 9 different vaccines, involving 263 subjects, that were treated with multiantigen-targeting vaccine were collected and analyzed. The MultiAg PEPI Score was calculated as the percentage of subjects with vaccine-specific PEPIs on at least two antigens. The results from this experiment demonstrated a significant correlation between ORR and MultiAg PEPI Score (r²=0.64; p=0.01), and ORR and MultiPEPI Score (r²=0.88 and p=0.001) (Error! Reference source not found. and F, respectively). These results suggest that T cell responses against multiple tumor antigens may recognize a larger tumor cell population, thereby increasing the likelihood of tumor shrinkage.

[0392] The next analysis explored whether PEPI-specific T cell responses against antigens expressed in the tumor of interest, increase the likelihood of tumor shrinkage. A total of 15 clinical trials enrolled subjects with target antigen positive disease and 11 clinical trials had no subject preselection based on antigen expression. The proportion of subjects with objective response was significantly higher in CTs with target antigen-positive subjects compared with CTs without pre-selection (21.0% vs. 3.6%, respectively, p=0.03)

The correlation between ORR and MultiPEPI Score was statistically significant in subjects with confirmed expression of target antigens (r²=0.56, p=0.005) (FIG. 10G). These results emphasize the importance of the presence of cognate PEPI in the tumor, and also that the presence of the cognate PEPI in the tumor increases the likelihood of tumor shrinkage.

[0393] This study demonstrated that the link between a subject's HLA genotype and PEPI is the most important factor in predicting clinical response to a vaccine. This study also showed that the PEPI Score can predict the clinical outcome of therapeutic vaccines.

### Example 12—Study Design of OBERTO Phase I/II Clinical Trial and Preliminary Safety Data

[0394] OBERTO trial is a Phase I/II trial of PolyPEPI1018 Vaccine and CDx for the Treatment of Metastatic Colorectal Cancer (NCT03391232). Study design is shown on FIG. 11.

### Enrollment Criteria

[0395] Histologically confirmed metastatic adenocarcinoma originating from the colon or the rectum
[0396] Presence of at least 1 measurable reference lesion according to RECIST 1.1
[0397] PR or stable disease during first-line treatment with a systemic chemotherapy regimen and 1 biological therapy regimen
[0398] Maintenance therapy with a fluoropyrimidine (5-fluorouracil or capecitabine) plus the same biologic agent (bevacizumab, cetuximab or panitumumab) used during induction, scheduled to initiate prior to the first day of treatment with the study drug
[0399] Last CT scan at 3 weeks or less before the first day of treatment

### Subject Withdrawal and Discontinuation.

[0400] During the initial study period (12 W), if a patient experiences disease progression and needs to start a second-line therapy, the patient will be withdrawn from the study.
[0401] During the second part of the study (after 2nd dose) if a patient experiences disease progression and needs to start a second-line therapy, the patient will remain in the study, receive the third vaccination as scheduled and complete follow-up.
[0402] Transient local erythema and edema at the site of vaccination were observed as expected, as well as a flu-like syndrome with minor fever and fatigue. These reactions are already well-known for peptide vaccination and usually are associated with the mechanism of action, because fever and flu-like syndrome might be the consequence and sign for the induction of immune responses (this is known as typical vaccine reactions for childhood vaccinations).
[0403] Only one serious adverse event (SAE) “possibly related” to the vaccine was recorded (Table 21).
[0404] One dose limiting toxicity (DLT) not related to the vaccine occurred (syncope).
   Safety results are summarized in Table 21.

TABLE 21
Serious adverse events reported in the OBERTO clinical trial.
No related SAE occurred (only 1 “possibly related”).

| Patient ID | SAE | Relatedness |
|---|---|---|
| 010001 | Death due to disease progression | Unrelated |
| 010004 | Embolism | Unlikely Related |
| 010004 | Abdominal pain | Unrelated |
| 010007 | Bowel Obstruction | Unrelated |
| 020004 | Non-Infectious Acute Encephalitis | Possibly Related |

### Example 13—Expression Frequency Based Target Antigen Selection During Vaccine Design and It's Clinical Validation for mCRC

[0405] Shared tumor antigens enable precise targeting of all tumor types—including the ones with low mutational burden. Population expression data collected previously from 2,391 CRC biopsies represents the variability of antigen expression in CRC patients worldwide (FIG. 12A).

[0406] PolyPEPI1018 is a peptide vaccine we designed to contain 12 unique epitopes derived from 7 conserved testis specific antigens (TSAs) frequently expressed in mCRC. In our model we supposed, that by selecting the TSA frequently expressed in CRC, the target identification will be correct and will eliminate the need for tumor biopsy. We have calculated that the probability of 3 out of 7 TSAs being expressed in each tumor is greater than 95%. (FIG. 12B)

[0407] In a phase I study we evaluated the safety, tolerability and immunogenicity of PolyPEPI1018 as an add-on to maintenance therapy in subjects with metastatic colorectal cancer (mCRC) (NCT03391232) (See also in Example 4).

[0408] Immunogenicity measurements proved pre-existing immune responses and indirectly confirmed target antigen expression in the patients. Immunogenicity was measured with enriched Fluorospot assay (ELISPOT) from PBMC samples isolated prior to vaccination and in different time points following a following single immunization with PolyPEPI1018 to confirm vaccine-induced T cell responses; PBMC samples were in vitro stimulated with vaccine-specific peptides (9mers and 30mers) to determine vaccine-induced T cell responses above baseline. In average 4, at least 2 patients had pre-existing CD8 T cell responses against each target antigen (FIG. 12C). 7 out of 10 patients had pre-existing immune responses against at least 1 antigen (average 3) (FIG. 12D). These results provide proof for the proper target selection, because CD8+ T cell response for a CRC specific target TSA prior to vaccination with PolyPEPI1018 vaccine confirms the expression of that target antigen in the analyzed patient. Targeting the real (expressed) TSAs is the prerequisite for an effective tumor vaccine.

### Example 14—Pre-Clinical and Clinical Immunogenicity of PolyPEPI1018 Vaccine Proves Proper Peptide Selection

[0409] PolyPEPI1018 vaccine contains six 30mer peptides, each designed by joining two immunogenic 15mer fragments (each involving a 9mer PEPI, consequently there are 2 PEPIs in each 30mer by design) derived from 7 TSAs (FIG. 13). These antigens are frequently expressed in CRC tumors based on analysis of 2,391 biopsies (FIG. 12).

[0410] Preclinical immunogenicity results calculated for the Model Population (n=433) and for a CRC cohort (n=37) resulted in 98% and 100% predicted immunogenicity based on PEPI test predictions and this was clinically proved in the OBERTO trial (n=10), with immune responses measured for at least one antigen in 90% of patients. More interestingly, 90% of patients had vaccine peptide specific immune responses against at least 2 antigens and 80% had CD8+ T cell response against 3 or more different vaccine antigens, showing evidence for appropriate target antigen selection during the design of PolyPEPI1018. CD4+ T cell specific and CD8+ T cell specific clinical immunogenicity is detailed in Table 22. High immune response rates were found for both effector and memory effector T cells, both for CD4+ and CD8+ T cells, and 9 of 10 patients' immune responses were boosted or de novo induced by the vaccine. Also, the fractions of CRC-reactive, polyfunctional CD8+ and CD4+ T cells have been increased in patient's PBMC after vaccination by 2.5- and 13-fold, respectively.

TABLE 22
Clinical immunogenicity results for PolyPEPI1018 in mCRC.

| Immunological responses | % Patients (n) | |
|---|---|---|
| CD4+ T cell responses | 100% | (10/10) |
| CD8+ T cell responses against ≥3 antigens | 80% | (8/10) |
| Both CD8+ and CD4+ T cell responses | 90% | (9/10) |
| Ex vivo detected CD8+ T cell response | 71% | (5/7) |
| Ex vivo detected CD4+ T cell response | 86% | (6/7) |

| | |
|---|---|
| Average increase of the fraction of | 0.39% |
| polyfunctional (IFN-γ and TNF-α positive) | |
| CD8+ T cells compared to pre-vaccination | |
| Average increase of the fraction of | 0.066% |
| polyfunctional (IL-2 and TNF-α positive) | |
| CD4+ T cells compared to pre-vaccination | |

### Example 15—Clinical Response for PolyPEPI1018 Treatment

[0411] The OBERTO clinical trial (NCT03391232), that has been further described in Examples 4, 12, 13 and 14 was analyzed for preliminary objective tumor response rates (RECIST 1.1) (FIGS. 14A-C). Of the eleven vaccinated patients on maintenance therapy, 5 had stable disease (SD) at the time point of the preliminary analysis (12 weeks), 3 experienced unexpected tumor responses (partial response, PR) observed on treatment (maintenance therapy+ vaccination) and 3 had progressed disease (PD) according to RECIST 1.1 criteria. Stable disease as best response was achieved in 69% of patients on maintenance therapy (capecitabine and bevacizumab). Patient 020004 had durable treatment effect after 12 weeks, and patient 010004 had long lasting treatment effect, qualified for curative surgery. Following the 3^{rd} vaccination this patient had no evidence of disease thus being complete responder, as shown on the swimmer plot on FIGS. 14A-C.

[0412] After one vaccination, ORR was 27%, DCR was 63%, and in patients receiving at least 2 doses (out of the 3 doses), 2 of 5 had ORR (40%) and DCR was as high as 80% (SD+PR+CR in 4 out of 5 patients) (Table 23).

TABLE 23
Clinical response for PolyPEPI1018 treatment after ≥1 and
≥2 vaccination dose

| Number of | Objective Response Rate | | Disease Control Rate | |
|---|---|---|---|---|
| vaccination dose | (CR + PR) | | (SD + PR + CR) | |
| ≥1 | 27% | (3/11) | 63% | (7/11) |
| ≥2 | 40% | (2/5) | 80% | (4/5) |

[0413] Based on the data of the 5 patients receiving multiple doses of PolyPEPI1018 vaccine in the OBERTO-101 clinical trial, preliminary data suggests that higher AGP count (>2) is associated with longer PFS and elevated tumor size reduction (FIGS. 14B and C).

### Example 16—Selection of Peptides for Treatment of Cancer

[0414] Based on the discovery of the role of PEPIs in T cell activation as described herein, a method was developed for designing peptides for the treatment of cancer. Specifically the peptides were designed to stimulate T cell responses against known tumor associated antigens in the maximum number of human subjects.

[0415] 192 TSAs were selected that are known to be expressed in one or more of 19 cancer indications (Table 24). Data concerning expression rates of the TSA in the different cancer indications, where available in peer reviewed publications, was used to rank the TSA in each indication by expression frequency. The ranking order for the TSA is different in each indication.

TABLE 24
TSA by indication and Expression Rate (ER)

| | | | |
|---|---|---|---|
| | AG | | |
| # | ID NO | Antigen | % |

BREAST

| | | | |
|---|---|---|---|
| 1 | 111 | PIWIL1 | 100% |
| 2 | 112 | PIWIL2 | 94% |
| 3 | 131 | SPAG9 | 88% |
| 4 | 8 | AKAP-4 | 85% |
| 5 | 36 | EpCAM | 76% |
| 6 | 62 | JARID1B | 76% |
| 7 | 27 | CTCFL | 74% |
| 8 | 154 | TSGA10 | 70% |
| 9 | 140 | Survivin | 68% |
| 10 | 19 | CDCA1 | 64% |
| 11 | 102 | ODF4 | 63% |
| 12 | 110 | PEPP2 | 60% |
| 13 | 71 | MAGE-A11 | 59% |
| 14 | 160 | XAGE-1 | 58% |
| 15 | 42 | FMR1NB | 55% |
| 16 | 168 | ATAD2 | 52% |
| 17 | 191 | WBP2NL | 50% |
| 18 | 31 | DBPC | 50% |
| 19 | 116 | PRAME | 49% |
| 20 | 59 | HOM-TES-85 | 47% |
| 21 | 96 | NY-BR-1 | 47% |
| 22 | 129 | SP17 | 47% |
| 23 | 79 | MAGE-A9 | 44% |
| 24 | 43 | FSIP1 | 42% |
| 25 | 2 | ACRBP | 40% |
| 26 | 7 | AKAP-3 | 40% |
| 27 | 145 | TDRD1 | 38% |
| 28 | 41 | FBXO39 | 38% |
| 29 | 123 | SCP-1 | 37% |
| 30 | 66 | LDHC | 35% |
| 31 | 67 | LEMD1 | 35% |
| 32 | 70 | MAGE-A10 | 34% |
| 33 | 69 | MAGE-A1 | 31% |
| 34 | 49 | GAGE-7 | 31% |
| 35 | 130 | SPAG1 | 31% |
| 36 | 22 | CT46 | 29% |
| 37 | 185 | SPAG8 | 29% |
| 38 | 74 | MAGE-A3 | 28% |
| 39 | 138 | SSX-4 | 27% |
| 40 | 132 | SPAN-Xc | 26% |
| 41 | 184 | SPAG6 | 21% |
| 42 | 33 | DKKL1 | 20% |
| 43 | 86 | MAGE-C2 | 19% |
| 44 | 85 | MAGE-C1 | 16% |
| 45 | 20 | CRISP2 | 15% |
| 46 | 98 | NY-ESO-1 | 15% |
| 47 | 77 | MAGE-A6 | 15% |
| 48 | 21 | CT45 | 15% |
| 49 | 55 | HAGE | 14% |
| 50 | 44 | FTHL17 | 14% |
| 51 | 30 | CXorf61 | 13% |
| 52 | 65 | Lage-1 | 12% |
| 53 | 72 | MAGE-A12 | 12% |
| 54 | 153 | TRAG-3 | 10% |
| 55 | 10 | BAGE-1 | 9% |
| 56 | 135 | SSX-1 | 9% |
| 57 | 75 | MAGE-A4 | 9% |
| 58 | 76 | MAGE-A5 | 9% |
| 59 | 63 | KOC1 | 8% |
| 60 | 136 | SSX-2 | 7% |
| 61 | 159 | WT1 | 7% |
| 62 | 127 | SLCO6A1 | 7% |
| 63 | 115 | PLAC1 | 4% |
| 64 | 23 | CT47 | 4% |
| 65 | 121 | SAGE1 | 2% |
| 66 | 95 | NXF2 | 2% |
| 67 | 149 | TEX15 | 0% |
| 68 | 147 | TEX101 | 0% |
| 69 | 142 | TAF7L | 0% |
| 70 | 139 | SSX-5 | 0% |
| 71 | 137 | SSX-3 | 0% |
| 72 | 134 | SPO11 | 0% |
| 73 | 101 | ODF3 | 0% |
| 74 | 88 | MORC1 | 0% |
| 75 | 17 | CALR3 | 0% |
| 76 | 4 | ADAM2 | 0% |

OVARIAN

| | | | |
|---|---|---|---|
| 1 | 36 | EpCAM | 92% |
| 2 | 131 | SPAG9 | 90% |
| 3 | 8 | AKAP-4 | 89% |
| 4 | 113 | PIWIL3 | 88% |
| 5 | 140 | Survivin | 85% |
| 6 | 153 | TRAG-3 | 83% |
| 7 | 27 | CTCFL | 82% |
| 8 | 62 | JARID1B | 71% |
| 9 | 111 | PIWIL1 | 68% |
| 10 | 2 | ACRBP | 65% |
| 11 | 179 | KIF20A | 65% |
| 12 | 159 | WT1 | 63% |
| 13 | 129 | SP17 | 62% |
| 14 | 112 | PIWIL2 | 61% |
| 15 | 116 | PRAME | 59% |
| 16 | 33 | DKKL1 | 57% |
| 17 | 7 | AKAP-3 | 48% |
| 18 | 66 | LDHC | 43% |
| 19 | 63 | KOC1 | 43% |
| 20 | 70 | MAGE-A10 | 38% |
| 21 | 79 | MAGE-A9 | 37% |
| 22 | 75 | MAGE-A4 | 37% |
| 23 | 154 | TSGA10 | 35% |
| 24 | 143 | TAG-1 | 35% |
| 25 | 21 | CT45 | 33% |
| 26 | 59 | HOM-TES-85 | 32% |
| 27 | 130 | SPAG1 | 31% |
| 28 | 35 | DPPA2 | 31% |
| 29 | 74 | MAGE-A3 | 30% |
| 30 | 124 | SCP3a | 25% |
| 31 | 69 | MAGE-A1 | 24% |
| 32 | 98 | NY-ESO-1 | 23% |
| 33 | 65 | Lage-1 | 22% |
| 34 | 115 | PLAC1 | 21% |
| 35 | 31 | DBPC | 20% |
| 36 | 85 | MAGE-C1 | 20% |
| 37 | 161 | XAGE-1b | 18% |
| 38 | 123 | SCP-1 | 15% |
| 39 | 88 | MORC1 | 14% |
| 40 | 20 | CRISP2 | 14% |
| 41 | 144 | TAG-2a | 13% |
| 42 | 138 | SSX-4 | 13% |
| 43 | 162 | XAGE-1c | 11% |
| 44 | 136 | SSX-2 | 7% |
| 45 | 73 | MAGE-A2 | 7% |
| 46 | 163 | XAGE-1d | 6% |
| 47 | 160 | XAGE-1 | 5% |
| 48 | 135 | SSX-1 | 2% |
| 49 | 139 | SSX-5 | 0% |
| 50 | 137 | SSX-3 | 0% |
| 51 | 134 | SPO11 | 0% |
| 52 | 132 | SPAN-Xc | 0% |
| 53 | 18 | CCDC62 | 0% |
| 54 | 4 | ADAM2 | 0% |

PANCREATIC

| | | | |
|---|---|---|---|
| 1 | 171 | CCDC110 | 100% |
| 2 | 181 | MSLN | 96% |
| 3 | 130 | SPAG1 | 93% |
| 4 | 36 | EpCAM | 85% |
| 5 | 174 | DKK1 | 84% |
| 6 | 140 | Survivin | 83% |
| 7 | 159 | WT1 | 72% |
| 8 | 111 | PIWIL1 | 71% |
| 9 | 179 | KIF20A | 63% |
| 10 | 1 | 5T4 | 62% |
| 11 | 31 | DBPC | 60% |
| 12 | 172 | CEA | 60% |
| 13 | 63 | KOC1 | 54% |
| 14 | 115 | PLAC1 | 44% |
| 15 | 64 | KU-CT-1 | 33% |
| 16 | 123 | SCP-1 | 31% |
| 17 | 27 | CTCFL | 29% |
| 18 | 69 | MAGE-A1 | 27% |
| 19 | 170 | CASC5 | 27% |
| 20 | 178 | hTERT | 21% |
| 21 | 138 | SSX-4 | 21% |
| 22 | 46 | GAGE-2 | 17% |
| 23 | 74 | MAGE-A3 | 11% |
| 24 | 65 | Lage-1 | 7% |
| 25 | 136 | SSX-2 | 4% |
| 26 | 98 | NY-ESO-1 | 4% |
| 27 | 75 | MAGE-A4 | 2% |
| 28 | 70 | MAGE-A10 | 1% |
| 29 | 137 | SSX-3 | 0% |
| 30 | 135 | SSX-1 | 0% |
| 31 | 132 | SPAN-Xc | 0% |
| 32 | 85 | MAGE-C1 | 0% |

BRAIN

| | | | |
|---|---|---|---|
| 1 | 166 | ZNF165 | 100% |
| 2 | 109 | PBK | 100% |
| 3 | 178 | hTERT | 100% |
| 4 | 175 | EZH2 | 100% |
| 5 | 37 | EPHA2 | 95% |
| 6 | 61 | IL13RA2 | 95% |
| 7 | 157 | TYR | 91% |
| 8 | 140 | Survivin | 87% |
| 9 | 54 | gp100 | 85% |
| 10 | 71 | MAGE-A1l | 85% |
| 11 | 154 | TSGA10 | 83% |
| 12 | 44 | FTHL17 | 82% |
| 13 | 159 | WT1 | 81% |
| 14 | 111 | PIWIL1 | 76% |
| 15 | 112 | PIWIL2 | 64% |
| 16 | 165 | XAGE-3 | 60% |
| 17 | 131 | SPAG9 | 60% |
| 18 | 128 | SOX-6 | 60% |
| 19 | 179 | KIF20A | 58% |
| 20 | 116 | PRAME | 56% |
| 21 | 3 | ACTL8 | 54% |
| 22 | 1 | 5T4 | 50% |
| 23 | 103 | O1P5 | 48% |
| 24 | 186 | SPINLW1 | 47% |
| 25 | 74 | MAGE-A3 | 42% |
| 26 | 45 | GAGE-1 | 42% |
| 27 | 69 | MAGE-A1 | 41% |
| 28 | 63 | KOC1 | 38% |
| 29 | 55 | HAGE | 38% |
| 30 | 29 | CXorf48 | 35% |
| 31 | 86 | MAGE-C2 | 34% |
| 32 | 108 | PASD1 | 31% |
| 33 | 73 | MAGE-A2 | 28% |
| 34 | 127 | SLCO6A1 | 19% |
| 35 | 160 | XAGE-1 | 18% |
| 36 | 95 | NXF2 | 18% |
| 37 | 36 | EpCAM | 16% |
| 38 | 123 | SCP-1 | 14% |
| 39 | 129 | SP17 | 13% |
| 40 | 85 | MAGE-C1 | 13% |
| 41 | 134 | SPO11 | 12% |
| 42 | 75 | MAGE-A4 | 11% |
| 43 | 59 | HOM-TES-85 | 10% |
| 44 | 27 | CTCFL | 9% |
| 45 | 39 | FAM46D | 8% |
| 46 | 84 | MAGE-B6 | 6% |
| 47 | 136 | SSX-2 | 4% |
| 48 | 138 | SSX-4 | 4% |
| 49 | 98 | NY-ESO-1 | 4% |
| 50 | 65 | Lage-1 | 2% |
| 51 | 153 | TRAG-3 | 0% |
| 52 | 152 | TPTE | 0% |
| 53 | 187 | SSX-7 | 0% |
| 54 | 139 | SSX-5 | 0% |
| 55 | 137 | SSX-3 | 0% |
| 56 | 135 | SSX-1 | 0% |
| 57 | 121 | SAGE1 | 0% |
| 58 | 87 | MART1 | 0% |
| 59 | 83 | MAGE-B4 | 0% |
| 60 | 81 | MAGE-B2 | 0% |
| 61 | 80 | MAGE-B1 | 0% |
| 62 | 30 | CXorf61 | 0% |
| 63 | 21 | CT45 | 0% |
| 64 | 14 | BRDT | 0% |
| 65 | 80 | MAGE-B1 | 0% |
| 66 | 30 | CXorf61 | 0% |
| 67 | 21 | CT45 | 0% |
| 68 | 14 | BRDT | 0% |

HCC

| | | | |
|---|---|---|---|
| 1 | 19 | CDCA1 | 100% |
| 2 | 129 | SP17 | 87% |
| 3 | 159 | WT1 | 86% |
| 4 | 2 | ACRBP | 70% |
| 5 | 135 | SSX-1 | 69% |
| 6 | 63 | KOC1 | 66% |
| 7 | 109 | PBK | 64% |
| 8 | 81 | MAGE-B2 | 61% |
| 9 | 132 | SPAN-Xc | 60% |
| 10 | 146 | TEKT5 | 60% |
| 11 | 60 | IGFS11 | 60% |
| 12 | 69 | MAGE-A1 | 56% |
| 13 | 27 | CTCFL | 55% |
| 14 | 140 | Survivin | 54% |
| 15 | 166 | ZNF165 | 52% |
| 16 | 131 | SPAG9 | 52% |
| 17 | 171 | CCDC110 | 50% |
| 18 | 7 | AKAP-3 | 50% |
| 19 | 40 | FATE1 | 49% |
| 20 | 138 | SSX-4 | 48% |
| 21 | 80 | MAGE-B1 | 47% |
| 22 | 136 | SSX-2 | 46% |
| 23 | 78 | MAGE-A8 | 45% |
| 24 | 36 | EpCAM | 41% |
| 25 | 115 | PLAC1 | 41% |
| 26 | 111 | PIWIL1 | 40% |
| 27 | 31 | DBPC | 40% |
| 28 | 16 | CAGE1 | 39% |
| 29 | 152 | TPTE | 39% |
| 30 | 86 | MAGE-C2 | 37% |
| 31 | 139 | SSX-5 | 37% |
| 32 | 65 | Lage-1 | 36% |
| 33 | 77 | MAGE-A6 | 36% |
| 34 | 72 | MAGE-A12 | 36% |
| 35 | 71 | MAGE-A11 | 36% |
| 36 | 156 | TSPY1 | 35% |
| 37 | 74 | MAGE-A3 | 34% |
| 38 | 160 | XAGE-1 | 33% |
| 39 | 62 | JARID1B | 29% |
| 40 | 153 | TRAG-3 | 26% |
| 41 | 123 | SCP-1 | 25% |
| 42 | 73 | MAGE-A2 | 25% |
| 43 | 29 | CXorf48 | 25% |
| 44 | 154 | TSGA10 | 20% |
| 45 | 85 | MAGE-C1 | 20% |
| 46 | 59 | HOM-TES-85 | 19% |
| 47 | 98 | NY-ESO-1 | 17% |
| 48 | 70 | MAGE-A10 | 15% |
| 49 | 188 | TDRD4 | 14% |
| 50 | 130 | SPAG1 | 11% |
| 51 | 75 | MAGE-A4 | 7% |
| 52 | 79 | MAGE-A9 | 5% |
| 53 | 18 | CCDC62 | 0% |

THYROID

| | | | |
|---|---|---|---|
| 1 | 159 | WT1 | 97% |
| 2 | 112 | PIWIL2 | 88% |
| 3 | 36 | EpCAM | 83% |
| 4 | 131 | SPAG9 | 78% |
| 5 | 63 | KOC1 | 65% |
| 6 | 116 | PRAME | 60% |
| 7 | 140 | Survivin | 53% |
| 8 | 108 | PASD1 | 25% |
| 9 | 66 | LDHC | 25% |
| 10 | 85 | MAGE-C1 | 22% |
| 11 | 74 | MAGE-A3 | 22% |
| 12 | 95 | NXF2 | 20% |
| 13 | 55 | HAGE | 20% |
| 14 | 69 | MAGE-A1 | 17% |
| 15 | 51 | GASZ | 13% |
| 16 | 129 | SP17 | 10% |
| 17 | 73 | MAGE-A2 | 9% |
| 18 | 39 | FAM46D | 8% |
| 19 | 136 | SSX-2 | 8% |
| 20 | 98 | NY-ESO-1 | 7% |
| 21 | 65 | Lage-1 | 4% |
| 22 | 70 | MAGE-A10 | 2% |
| 23 | 157 | TYR | 0% |
| 24 | 149 | TEX15 | 0% |
| 25 | 145 | TDRD1 | 0% |
| 26 | 142 | TAF7L | 0% |
| 27 | 139 | SSX-5 | 0% |
| 28 | 138 | SSX-4 | 0% |
| 29 | 137 | SSX-3 | 0% |
| 30 | 135 | SSX-1 | 0% |
| 31 | 134 | SPO11 | 0% |
| 32 | 123 | SCP-1 | 0% |
| 33 | 121 | SAGE1 | 0% |
| 34 | 119 | RAGE-1 | 0% |
| 35 | 92 | NKX3.1 | 0% |
| 36 | 88 | MORC1 | 0% |
| 37 | 87 | MART1 | 0% |
| 38 | 86 | MAGE-C2 | 0% |
| 39 | 75 | MAGE-A4 | 0% |
| 40 | 44 | FTHL17 | 0% |
| 41 | 33 | DKKL1 | 0% |
| 42 | 20 | CRISP2 | 0% |
| 43 | 1 | 5T4 | 0% |
| 44 | 1 | 5T4 | 0% |

LUNG

| | | | |
|---|---|---|---|
| 1 | 179 | KIF20A | 95% |
| 2 | 173 | CEP55 | 94% |
| 3 | 32 | DCAF12 | 89% |
| 4 | 19 | CDCA1 | 85% |
| 5 | 36 | EpCAM | 78% |
| 6 | 130 | SPAG1 | 71% |
| 7 | 192 | ZNF645 | 68% |
| 8 | 115 | PLAC1 | 68% |
| 9 | 112 | PIWIL2 | 66% |
| 10 | 116 | PRAME | 63% |
| 11 | 63 | KOC1 | 62% |
| 12 | 140 | Survivin | 59% |
| 13 | 131 | SPAG9 | 56% |
| 14 | 62 | JARID1B | 55% |
| 15 | 153 | TRAG-3 | 54% |
| 16 | 77 | MAGE-A6 | 51% |
| 17 | 39 | FAM46D | 50% |
| 18 | 171 | CCDC110 | 50% |
| 19 | 22 | CT46 | 47% |
| 20 | 7 | AKAP-3 | 46% |
| 21 | 81 | MAGE-B2 | 43% |
| 22 | 161 | XAGE-1b | 43% |
| 23 | 185 | SPAG8 | 43% |
| 24 | 69 | MAGE-A1 | 42% |
| 25 | 170 | CASC5 | 41% |
| 26 | 73 | MAGE-A2 | 40% |
| 27 | 177 | HSPB9 | 40% |
| 28 | 93 | NLRP4 | 38% |
| 29 | 64 | KU-CT-1 | 38% |
| 30 | 14 | BRDT | 37% |
| 31 | 74 | MAGE-A3 | 37% |
| 32 | 152 | TPTE | 36% |
| 33 | 27 | CTCFL | 36% |
| 34 | 30 | CXorf61 | 34% |
| 35 | 55 | HAGE | 32% |
| 36 | 21 | CT45 | 32% |
| 37 | 150 | THEG | 31% |
| 38 | 158 | VCX | 31% |
| 39 | 72 | MAGE-A12 | 31% |
| 40 | 31 | DBPC | 30% |
| 41 | 35 | DPPA2 | 30% |
| 42 | 20 | CRISP2 | 29% |
| 43 | 184 | SPAG6 | 29% |
| 44 | 108 | PASD1 | 29% |
| 45 | 66 | LDHC | 29% |
| 46 | 51 | GASZ | 29% |
| 47 | 65 | Lage-1 | 28% |
| 48 | 42 | FMR1NB | 28% |
| 49 | 75 | MAGE-A4 | 27% |
| 50 | 86 | MAGE-C2 | 27% |
| 51 | 160 | XAGE-1 | 25% |
| 52 | 44 | FTHL17 | 25% |
| 53 | 8 | AKAP-4 | 25% |
| 54 | 70 | MAGE-A10 | 24% |
| 55 | 167 | COX6B2 | 24% |
| 56 | 168 | ATAD2 | 23% |
| 57 | 166 | ZNF165 | 21% |
| 58 | 149 | TEX15 | 21% |
| 59 | 182 | PTTG-1 | 20% |
| 60 | 2 | ACRBP | 20% |
| 61 | 85 | MAGE-C1 | 19% |
| 62 | 88 | MORC1 | 18% |
| 63 | 98 | NY-ESO-1 | 17% |
| 64 | 132 | SPAN-Xc | 17% |
| 65 | 169 | CABYR | 16% |
| 66 | 111 | PIWIL1 | 15% |
| 67 | 95 | NXF2 | 15% |
| 68 | 29 | CXorf48 | 15% |
| 69 | 121 | SAGE1 | 15% |
| 70 | 23 | CT47 | 14% |
| 71 | 16 | CAGE1 | 14% |
| 72 | 80 | MAGE-B1 | 13% |
| 73 | 138 | SSX-4 | 13% |
| 74 | 163 | XAGE-1d | 13% |
| 75 | 61 | IL13RA2 | 12% |
| 76 | 33 | DKKL1 | 12% |
| 77 | 129 | SP17 | 12% |
| 78 | 141 | SYCE1 | 11% |
| 79 | 59 | HOM-TES-85 | 11% |
| 80 | 10 | BAGE-1 | 10% |
| 81 | 136 | SSX-2 | 10% |
| 82 | 146 | TEKT5 | 10% |
| 83 | 142 | TAF7L | 9% |
| 84 | 17 | CALR3 | 9% |
| 85 | 135 | SSX-1 | 8% |
| 86 | 113 | PIWIL3 | 7% |
| 87 | 5 | ADAM29 | 7% |
| 88 | 127 | SLCO6A1 | 7% |
| 89 | 145 | TDRD1 | 5% |
| 90 | 176 | HORMAD2 | 5% |
| 91 | 139 | SSX-5 | 4% |
| 92 | 123 | SCP-1 | 1% |
| 93 | 4 | ADAM2 | 1% |
| 94 | 162 | XAGE-1c | 0% |
| 95 | 156 | TSPY1 | 0% |
| 96 | 134 | SPO11 | 0% |
| 97 | 83 | MAGE-B4 | 0% |
| 98 | 82 | MAGE-B3 | 0% |
| 99 | 68 | LIPI | 0% |
| 100 | 41 | FBXO39 | 0% |
| 101 | 40 | FATE1 | 0% |

BLADDER

| | | | |
|---|---|---|---|
| 1 | 19 | CDCA1 | 100% |
| 2 | 89 | MPHOSPH1 | 90% |
| 3 | 112 | PIWIL2 | 82% |
| 4 | 131 | SPAG9 | 81% |
| 5 | 140 | Survivin | 62% |
| 6 | 79 | MAGE-A9 | 61% |
| 7 | 78 | MAGE-A8 | 57% |
| 8 | 36 | EpCAM | 54% |
| 9 | 24 | CTAGE1 | 53% |
| 10 | 25 | CTAGE2 | 49% |
| 11 | 109 | PBK | 43% |
| 12 | 74 | MAGE-A3 | 42% |
| 13 | 154 | TSGA10 | 38% |
| 14 | 69 | MAGE-A1 | 34% |
| 15 | 98 | NY-ESO-1 | 31% |
| 16 | 65 | Lage-1 | 30% |
| 17 | 72 | MAGE-A12 | 29% |
| 18 | 145 | TDRD1 | 29% |
| 19 | 2 | ACRBP | 28% |
| 20 | 70 | MAGE-A10 | 28% |
| 21 | 85 | MAGE-C1 | 27% |
| 22 | 75 | MAGE-A4 | 27% |
| 23 | 77 | MAGE-A6 | 25% |
| 24 | 73 | MAGE-A2 | 25% |
| 25 | 55 | HAGE | 24% |
| 26 | 44 | FTHL17 | 22% |
| 27 | 149 | TEX15 | 21% |
| 28 | 63 | KOC1 | 20% |
| 29 | 22 | CT46 | 20% |
| 30 | 116 | PRAME | 19% |
| 31 | 86 | MAGE-C2 | 19% |
| 32 | 95 | NXF2 | 19% |
| 33 | 136 | SSX-2 | 13% |
| 34 | 121 | SAGE1 | 12% |
| 35 | 138 | SSX-4 | 11% |
| 36 | 142 | TAF7L | 10% |
| 37 | 132 | SPAN-Xc | 9% |
| 38 | 135 | SSX-1 | 7% |
| 39 | 123 | SCP-1 | 2% |
| 40 | 156 | TSPY1 | 0% |
| 41 | 81 | MAGE-B2 | 0% |
| 42 | 80 | MAGE-B1 | 0% |
| 43 | 59 | HOM-TES-85 | 0% |

LEUKEMIAS

| | | | |
|---|---|---|---|
| 1 | 131 | SPAG9 | 100% |
| 2 | 38 | FAM133A | 83% |
| 3 | 26 | cTAGE5 | 74% |
| 4 | 24 | CTAGE1 | 72% |
| 5 | 85 | MAGE-C1 | 70% |
| 6 | 74 | MAGE-A3 | 65% |
| 7 | 98 | NY-ESO-1 | 65% |
| 8 | 62 | JARID1B | 60% |
| 9 | 166 | ZNF165 | 52% |
| 10 | 65 | Lage-1 | 49% |
| 11 | 124 | SCP3a | 47% |
| 12 | 28 | CTNNA2 | 45% |
| 13 | 86 | MAGE-C2 | 37% |
| 14 | 75 | MAGE-A4 | 36% |
| 15 | 135 | SSX-1 | 31% |
| 16 | 138 | SSX-4 | 30% |
| 17 | 139 | SSX-5 | 24% |
| 18 | 116 | PRAME | 23% |
| 19 | 72 | MAGE-A12 | 21% |
| 20 | 69 | MAGE-A1 | 20% |
| 21 | 136 | SSX-2 | 12% |
| 22 | 156 | TSPY1 | 12% |
| 23 | 123 | SCP-1 | 11% |
| 24 | 73 | MAGE-A2 | 11% |
| 25 | 79 | MAGE-A9 | 9% |
| 26 | 68 | LIPI | 6% |
| 27 | 4 | ADAM2 | 6% |
| 28 | 148 | TEX14 | 5% |
| 29 | 80 | MAGE-B1 | 5% |
| 30 | 105 | PAGE2 | 4% |
| 31 | 132 | SPAN-Xc | 4% |
| 32 | 137 | SSX-3 | 4% |
| 33 | 83 | MAGE-B4 | 3% |
| 34 | 70 | MAGE-A10 | 0% |

MELANOMA

| | | | |
|---|---|---|---|
| 1 | 62 | JARID1B | 100% |
| 2 | 140 | Survivin | 96% |
| 3 | 116 | PRAME | 90% |
| 4 | 87 | MART1 | 89% |
| 5 | 157 | TYR | 87% |
| 6 | 54 | gp100 | 82% |
| 7 | 132 | SPAN-Xc | 70% |
| 8 | 77 | MAGE-A6 | 65% |
| 9 | 179 | KIF20A | 64% |
| 10 | 151 | TMEM31 | 63% |
| 11 | 73 | MAGE-A2 | 62% |
| 12 | 74 | MAGE-A3 | 60% |
| 13 | 119 | RAGE-1 | 60% |
| 14 | 171 | CCDC110 | 60% |
| 15 | 71 | MAGE-A11 | 54% |
| 16 | 161 | XAGE-1b | 50% |
| 17 | 72 | MAGE-A12 | 49% |
| 18 | 63 | KOC1 | 46% |
| 19 | 85 | MAGE-C1 | 45% |
| 20 | 70 | MAGE-A10 | 45% |
| 21 | 86 | MAGE-C2 | 45% |
| 22 | 108 | PASD1 | 44% |
| 23 | 17 | CALR3 | 44% |
| 24 | 66 | LDHC | 44% |
| 25 | 163 | XAGE-1d | 43% |
| 26 | 98 | NY-ESO-1 | 37% |
| 27 | 69 | MAGE-A1 | 37% |
| 28 | 136 | SSX-2 | 35% |
| 29 | 65 | Lage-1 | 35% |
| 30 | 75 | MAGE-A4 | 30% |
| 31 | 162 | XAGE-1c | 29% |
| 32 | 39 | FAM46D | 28% |
| 33 | 149 | TEX15 | 27% |
| 34 | 27 | CTCFL | 27% |
| 35 | 10 | BAGE-1 | 26% |
| 36 | 154 | TSGA10 | 25% |
| 37 | 135 | SSX-1 | 25% |
| 38 | 76 | MAGE-A5 | 25% |
| 39 | 33 | DKKL1 | 25% |
| 40 | 11 | BAGE-2 | 23% |
| 41 | 107 | PAGE5 | 22% |
| 42 | 81 | MAGE-B2 | 22% |
| 43 | 142 | TAF7L | 21% |
| 44 | 138 | SSX-4 | 21% |
| 45 | 80 | MAGE-B1 | 19% |
| 46 | 88 | MORC1 | 19% |
| 47 | 55 | HAGE | 17% |
| 48 | 51 | GASZ | 17% |
| 49 | 123 | SCP-1 | 16% |
| 50 | 164 | XAGE-2 | 14% |
| 51 | 12 | BAGE-3 | 14% |
| 52 | 164 | XAGE-2 | 14% |
| 53 | 12 | BAGE-3 | 14% |
| 54 | 79 | MAGE-A9 | 12% |
| 55 | 78 | MAGE-A8 | 10% |
| 56 | 13 | BAGE-5 | 9% |
| 57 | 95 | NXF2 | 8% |
| 58 | 160 | XAGE-1 | 7% |
| 59 | 134 | SPO11 | 6% |
| 60 | 20 | CRISP2 | 6% |
| 61 | 139 | SSX-5 | 5% |
| 62 | 121 | SAGE1 | 5% |
| 63 | 4 | ADAM2 | 3% |
| 64 | 165 | XAGE-3 | 0% |
| 65 | 145 | TDRD1 | 0% |
| 66 | 68 | LIPI | 0% |
| 67 | 64 | KU-CT-1 | 0% |
| 68 | 44 | FTHL17 | 0% |
| 69 | 168 | ATAD2 | 0% |

GASTRIC

| | | | |
|---|---|---|---|
| 1 | 140 | Survivin | 100% |
| 2 | 35 | DPPA2 | 100% |
| 3 | 171 | CCDC110 | 100% |
| 4 | 36 | EpCAM | 90% |
| 5 | 7 | AKAP-3 | 89% |
| 6 | 60 | IGFS11 | 88% |
| 7 | 30 | CXorf61 | 80% |
| 8 | 16 | CAGE1 | 77% |
| 9 | 111 | PIWIL1 | 76% |
| 10 | 155 | TSP50 | 57% |
| 11 | 1 | 5T4 | 52% |
| 12 | 63 | KOC1 | 52% |
| 13 | 31 | DBPC | 50% |
| 14 | 103 | OIP5 | 48% |
| 15 | 108 | PASD1 | 44% |
| 16 | 168 | ATAD2 | 43% |
| 17 | 146 | TEKT5 | 40% |
| 18 | 17 | CALR3 | 40% |
| 19 | 74 | MAGE-A3 | 37% |
| 20 | 73 | MAGE-A2 | 31% |
| 21 | 69 | MAGE-A1 | 31% |
| 22 | 70 | MAGE-A10 | 30% |
| 23 | 75 | MAGE-A4 | 24% |
| 24 | 138 | SSX-4 | 23% |
| 25 | 29 | CXorf48 | 21% |
| 26 | 116 | PRAME | 21% |
| 27 | 123 | SCP-1 | 14% |
| 28 | 65 | Lage-1 | 14% |
| 29 | 135 | SSX-1 | 13% |
| 30 | 98 | NY-ESO-1 | 12% |
| 31 | 39 | FAM46D | 11% |
| 32 | 153 | TRAG-3 | 10% |
| 33 | 86 | MAGE-C2 | 10% |
| 34 | 166 | ZNF165 | 9% |
| 35 | 161 | XAGE-1b | 9% |
| 36 | 121 | SAGE1 | 8% |
| 37 | 21 | CT45 | 8% |
| 38 | 18 | CCDC62 | 7% |
| 39 | 95 | NXF2 | 6% |
| 40 | 85 | MAGE-C1 | 6% |
| 41 | 41 | FBXO39 | 4% |
| 42 | 136 | SSX-2 | 3% |
| 43 | 40 | FATE1 | 2% |
| 44 | 156 | TSPY1 | 0% |
| 45 | 152 | TPTE | 0% |
| 46 | 139 | SSX-5 | 0% |
| 47 | 132 | SPAN-Xc | 0% |
| 48 | 81 | MAGE-B2 | 0% |
| 49 | 80 | MAGE-B2 | 0% |
| 50 | 51 | GASZ | 0% |
| 51 | 19 | CDCA1 | 0% |
| 52 | 2 | ACRBP | 0% |

Cervical

| | | | |
|---|---|---|---|
| 1 | 112 | PIWIL2 | 100% |
| 2 | 1 | 5T4 | 100% |
| 3 | 16 | CAGE1 | 98% |
| 4 | 140 | Survivin | 92% |
| 5 | 8 | AKAP-4 | 86% |
| 6 | 66 | LDHC | 83% |
| 7 | 111 | PIWIL1 | 83% |
| 8 | 131 | SPAG9 | 82% |
| 9 | 63 | KOC1 | 68% |
| 10 | 129 | SP17 | 61% |
| 11 | 108 | PASD1 | 58% |
| 12 | 51 | GASZ | 50% |
| 13 | 98 | NY-ESO-1 | 42% |
| 14 | 39 | FAM46D | 37% |
| 15 | 36 | EpCAM | 36% |
| 16 | 179 | KIF20A | 35% |
| 17 | 134 | SPO11 | 33% |
| 18 | 33 | DKKL1 | 33% |
| 19 | 27 | CTCFL | 32% |
| 20 | 65 | Lage-1 | 26% |
| 21 | 75 | MAGE-A4 | 23% |
| 22 | 138 | SSX-4 | 20% |
| 23 | 19 | CDCA1 | 18% |
| 24 | 69 | MAGE-A1 | 17% |
| 25 | 20 | CRISP2 | 17% |
| 26 | 74 | MAGE-A3 | 16% |
| 27 | 159 | WT1 | 5% |
| 28 | 136 | SSX-2 | 4% |
| 29 | 135 | SSX-1 | 4% |
| 30 | 88 | MORC1 | 0% |
| 31 | 70 | MAGE-A10 | 0% |
| 32 | 4 | ADAM2 | 0% |

PROSTATE

| | | | |
|---|---|---|---|
| 1 | 115 | PLAC1 | 100% |
| 2 | 112 | PIWIL2 | 100% |
| 3 | 106 | PAGE4 | 100% |
| 4 | 62 | JARID1B | 100% |
| 5 | 36 | EpCAM | 98% |
| 6 | 27 | CTCFL | 98% |
| 7 | 133 | SPATA19 | 88% |
| 8 | 19 | CDCA1 | 85% |
| 9 | 140 | Survivin | 83% |
| 10 | 92 | NKX3.1 | 70% |
| 11 | 8 | AKAP-4 | 65% |
| 12 | 32 | DCAF12 | 59% |
| 13 | 145 | TDRD1 | 47% |
| 14 | 31 | DBPC | 40% |
| 15 | 66 | LDHC | 38% |
| 16 | 20 | CRISP2 | 38% |
| 17 | 90 | MUC-1 | 34% |
| 18 | 39 | FAM46D | 33% |
| 19 | 108 | PASD1 | 29% |
| 20 | 136 | SSX-2 | 28% |
| 21 | 130 | SPAG1 | 27% |
| 22 | 94 | NR6A1 | 25% |
| 23 | 4 | ADAM2 | 25% |
| 24 | 34 | DMRT1 | 24% |
| 25 | 67 | LEMD1 | 23% |
| 26 | 77 | MAGE-A6 | 23% |
| 27 | 55 | HAGE | 22% |
| 28 | 18 | CCDC62 | 22% |
| 29 | 98 | NY-ESO-1 | 21% |
| 30 | 73 | MAGE-A2 | 18% |
| 31 | 154 | TSGA10 | 15% |
| 32 | 74 | MAGE-A3 | 15% |
| 33 | 95 | NXF2 | 14% |
| 34 | 69 | MAGE-A1 | 13% |
| 35 | 149 | TEX15 | 13% |
| 36 | 33 | DKKL1 | 13% |
| 37 | 146 | TEKT5 | 11% |
| 38 | 129 | SP17 | 10% |
| 39 | 116 | PRAME | 10% |
| 40 | 100 | ODF2 | 10% |
| 41 | 99 | ODF1 | 10% |
| 42 | 70 | MAGE-A10 | 10% |
| 43 | 64 | KU-CT-1 | 10% |
| 44 | 65 | Lage-1 | 8% |
| 45 | 135 | SSX-1 | 7% |
| 46 | 86 | MAGE-C2 | 6% |
| 47 | 72 | MAGE-A12 | 5% |
| 48 | 111 | PIWIL1 | 4% |
| 49 | 2 | ACRBP | 4% |
| 50 | H7 | PRSS55 | 1% |
| 51 | 142 | TAF7L | 0% |
| 52 | 134 | SPO11 | 0% |
| 53 | 102 | ODF4 | 0% |
| 54 | 101 | ODF3 | 0% |
| 55 | 88 | MORC1 | 0% |
| 56 | 81 | MAGE-B2 | 0% |
| 57 | 80 | MAGE-B1 | 0% |
| 58 | 75 | MAGE-A4 | 0% |
| 59 | 63 | KOC1 | 0% |
| 60 | 44 | FTHL17 | 0% |
| 61 | 42 | FMR1NB | 0% |
| 62 | 10 | BAGE-1 | 0% |
| 63 | 168 | ATAD2 | 0% |

CRC

| | | | |
|---|---|---|---|
| 1 | 180 | MCAK | 100% |
| 2 | H3 | PIWIL3 | 96% |
| 3 | 67 | LEMD1 | 94% |
| 4 | 159 | WT1 | 91% |
| 5 | 31 | DBPC | 90% |
| 6 | 155 | TSP50 | 89% |
| 7 | 36 | EpCAM | 88% |
| 8 | 140 | Survivin | 87% |
| 9 | 1 | 5T4 | 85% |
| 10 | 7 | AKAP-3 | 83% |
| 11 | 27 | CTCFL | 80% |
| 12 | H2 | PIWIL2 | 80% |
| 13 | 16 | CAGE1 | 74% |
| 14 | 8 | AKAP-4 | 74% |
| 15 | 131 | SPAG9 | 71% |
| 16 | 63 | KOC1 | 65% |
| 17 | 2 | ACRBP | 63% |
| 18 | 168 | ATAD2 | 58% |
| 19 | 130 | SPAG1 | 55% |
| 20 | 60 | IGES11 | 55% |
| 21 | 146 | TEKT5 | 50% |
| 22 | 171 | CCDC110 | 50% |
| 23 | 111 | PIWIL1 | 48% |
| 24 | 108 | PASD1 | 44% |
| 25 | 78 | MAGE-A8 | 44% |
| 26 | 35 | DPPA2 | 44% |
| 27 | 166 | ZNF165 | 43% |
| 28 | 177 | HSPB9 | 40% |
| 29 | 19 | CDCA1 | 40% |
| 30 | 41 | FBXO39 | 39% |
| 31 | 106 | PAGE4 | 33% |
| 32 | 26 | cTAGE5 | 31% |
| 33 | 97 | NYD-TSPG | 30% |
| 34 | 115 | PLAC1 | 27% |
| 35 | 132 | SPAN-Xc | 24% |
| 36 | 51 | GASZ | 22% |
| 37 | 39 | FAM46D | 22% |
| 38 | 77 | MAGE-A6 | 22% |
| 39 | 74 | MAGE-A3 | 22% |
| 40 | 40 | FATE1 | 21% |
| 41 | 24 | CTAGE1 | 19% |
| 42 | 75 | MAGE-A4 | 18% |
| 43 | 73 | MAGE-A2 | 18% |
| 44 | 29 | CXorf48 | 17% |
| 45 | 17 | CALR3 | 16% |
| 46 | 66 | LDHC | 15% |
| 47 | 55 | HAGE | 15% |
| 48 | 69 | MAGE-A1 | 14% |
| 49 | 65 | Lage-1 | 13% |
| 50 | 18 | CCDC62 | 13% |
| 51 | 107 | PAGE5 | 11% |
| 52 | 21 | CT45 | 10% |
| 53 | 95 | NXF2 | 9% |
| 54 | 119 | RAGE-1 | 8% |
| 55 | 76 | MAGE-A5 | 7% |
| 56 | 22 | CT46 | 7% |
| 57 | 153 | TRAG-3 | 7% |
| 58 | 72 | MAGE-A12 | 6% |
| 59 | 123 | SCP-1 | 6% |
| 60 | | SSX-2 | 5% |
| 61 | 154 | TSGA10 | 5% |
| 62 | 86 | MAGE-C2 | 4% |
| 63 | 152 | TPTE | 4% |
| 64 | 116 | PRAME | 4% |
| 65 | 98 | NY-ESO-1 | 3% |
| 66 | 70 | MAGE-A10 | 3% |
| 67 | 135 | SSX-1 | 2% |
| 68 | 139 | SSX-5 | 2% |
| 69 | 85 | MAGE-C1 | I% |
| 70 | 121 | SAGE1 | I% |
| 71 | 149 | TEX15 | 0% |
| 72 | 145 | TDRD1 | 0% |
| 73 | 142 | TAF7L | 0% |
| 74 | 137 | SSX-3 | 0% |
| 75 | 134 | SPO11 | 0% |
| 76 | 104 | PAGE1 | 0% |
| 77 | 88 | MORC1 | 0% |
| 78 | 81 | MAGE-B2 | 0% |
| 79 | 80 | MAGE-B1 | 0% |
| 80 | 68 | LIPI | 0% |
| 81 | 44 | FTHL17 | 0% |
| 82 | 33 | DKKL1 | 0% |
| 83 | 20 | CRISP2 | 0% |
| 84 | 10 | BAGE-1 | 0% |
| 85 | 4 | ADAM2 | 0% |
| 86 | 10 | BAGE-1 | 0% |
| 87 | 4 | ADAM2 | 0% |

LYMPHOMAS

| | | | |
|---|---|---|---|
| 1 | 123 | SCP-1 | 39% |
| 2 | 74 | MAGE-A3 | 17% |
| 3 | 138 | SSX-4 | 16% |
| 4 | 136 | SSX-2 | 16% |
| 5 | 59 | HOM-TES-85 | 14% |
| 6 | 85 | MAGE-C1 | 13% |
| 7 | 98 | NY-ESO-1 | 11% |
| 8 | 69 | MAGE-A1 | 9% |
| 9 | 135 | SSX-1 | 6% |
| 10 | 156 | TSPY1 | 0% |
| 11 | 86 | MAGE-C2 | 0% |

PEDIATRIC

| | | | |
|---|---|---|---|
| 1 | 37 | EPHA2 | 100% |
| 2 | 77 | MAGE-A6 | 80% |
| 3 | 135 | SSX-1 | 76% |
| 4 | 74 | MAGE-A3 | 76% |
| 5 | 116 | PRAME | 75% |
| 6 | 122 | SART3 | 73% |
| 7 | 138 | SSX-4 | 67% |
| 8 | 73 | MAGE-A2 | 60% |
| 9 | 61 | IL13RA2 | 58% |
| 10 | 160 | XAGE-1 | 53% |
| 11 | 136 | SSX-2 | 44% |
| 12 | 69 | MAGE-A1 | 44% |
| 13 | 98 | NY-ESO-1 | 42% |
| 14 | 75 | MAGE-A4 | 41% |
| 15 | 72 | MAGE-A12 | 41% |
| 16 | 86 | MAGE-C2 | 40% |
| 17 | 85 | MAGE-C1 | 39% |
| 18 | 70 | MAGE-A10 | 33% |
| 19 | 164 | XAGE-2 | 14% |
| 20 | 65 | Lage-1 | 7% |

Kidney

| | | | |
|---|---|---|---|
| 1 | 19 | CDCA1 | 100% |
| 2 | 131 | SPAG9 | 88% |
| 3 | 17 | CALR3 | 80% |
| 4 | 66 | LDHC | 57% |
| 5 | 36 | EpCAM | 55% |
| 6 | 79 | MAGE-A9 | 55% |
| 7 | 111 | PIWIL1 | 52% |
| 8 | 112 | PIWIL2 | 49% |
| 9 | 107 | PAGE5 | 44% |
| 10 | 116 | PRAME | 40% |
| 11 | 140 | Survivin | 40% |
| 12 | 119 | RAGE-1 | 37% |
| 13 | 149 | TEX15 | 33% |
| 14 | 74 | MAGE-A3 | 27% |
| 15 | 68 | LIPI | 25% |
| 16 | 18 | CCDC62 | 25% |
| 17 | 63 | KOC1 | 22% |
| 18 | 75 | MAGE-A4 | 17% |
| 19 | 20 | CRISP2 | 14% |
| 20 | 64 | KU-CT-1 | 13% |
| 21 | 130 | SPAG1 | 11% |
| 22 | 69 | MAGE-A1 | 11% |
| 23 | 31 | DBPC | 10% |
| 24 | 4 | ADAM2 | 9% |
| 25 | 123 | SCP-1 | 8% |
| 26 | 73 | MAGE-A2 | 7% |
| 27 | 55 | HAGE | 6% |
| 28 | 156 | TSPY1 | 5% |
| 29 | 121 | SAGE1 | 5% |
| 30 | 72 | MAGE-A12 | 4% |
| 31 | 98 | NY-ESO-1 | 2% |
| 32 | 136 | SSX-2 | 2% |
| 33 | 65 | Lage-1 | 2% |
| 34 | 70 | MAGE-A10 | 1% |
| 35 | 145 | TDRD1 | 0% |
| 36 | 142 | TAF7L | 0% |
| 37 | 139 | SSX-5 | 0% |
| 38 | 138 | SSX-4 | 0% |
| 39 | 137 | SSX-3 | 0% |
| 40 | 135 | SSX-1 | 0% |
| 41 | 134 | SPO11 | 0% |
| 42 | 95 | NXF2 | 0% |
| 43 | 88 | MORC1 | 0% |
| 44 | 85 | MAGE-C1 | 0% |
| 45 | 81 | MAGE-B2 | 0% |
| 46 | 80 | MAGE-B1 | 0% |
| 47 | 77 | MAGE-A6 | 0% |
| 48 | 44 | FTHL17 | 0% |
| 49 | 42 | FMR1NB | 0% |
| 50 | 33 | DKKL1 | 0% |
| 51 | 14 | BRDT | 0% |
| 52 | 10 | BAGE-1 | 0% |
| 53 | 2 | ACRBP | 0% |

HEAD and NECK

| | | | |
|---|---|---|---|
| 1 | 140 | Survivin | 91% |
| 2 | 171 | CCDC110 | 67% |
| 3 | 116 | PRAME | 61% |
| 4 | 77 | MAGE-A6 | 58% |
| 5 | 81 | MAGE-B2 | 45% |
| 6 | 79 | MAGE-A9 | 44% |
| 7 | 75 | MAGE-A4 | 42% |
| 8 | 160 | XAGE-1 | 40% |
| 9 | 135 | SSX-1 | 40% |
| 10 | 74 | MAGE-A3 | 40% |
| 11 | 45 | GAGE-1 | 39% |
| 12 | 73 | MAGE-A2 | 38% |
| 13 | 71 | MAGE-A11 | 37% |
| 14 | 72 | MAGE-A12 | 34% |
| 15 | 63 | KOC1 | 29% |
| 16 | 138 | SSX-4 | 29% |
| 17 | 86 | MAGE-C2 | 29% |
| 18 | 29 | CXorf48 | 27% |
| 19 | 69 | MAGE-A1 | 23% |
| 20 | 145 | TDRD1 | 22% |
| 21 | 55 | HAGE | 20% |
| 22 | 98 | NY-ESO-1 | 20% |
| 23 | 121 | SAGE1 | 17% |
| 24 | 136 | SSX-2 | 17% |
| 25 | 85 | MAGE-C1 | 15% |
| 26 | 70 | MAGE-A10 | 12% |
| 27 | 165 | XAGE-3 | 12% |
| 28 | 123 | SCP-1 | 12% |
| 29 | 103 | OIP5 | 12% |
| 30 | 18 | CCDC62 | 12% |
| 31 | 65 | Lage-1 | 11% |
| 32 | 20 | CRISP2 | 11% |
| 33 | 149 | TEX15 | 11% |
| 34 | 142 | TAF7L | 10% |
| 35 | 44 | FTHL17 | 10% |
| 36 | 49 | GAGE-7 | 9% |
| 37 | 139 | SSX-5 | 7% |
| 38 | 130 | SPAG1 | 7% |
| 39 | 10 | BAGE-1 | 6% |
| 40 | 164 | XAGE-2 | 6% |
| 41 | 107 | PAGES | 6% |
| 42 | 95 | NXF2 | 5% |
| 43 | 59 | HOM-TES-85 | 4% |
| 44 | 96 | NY-BR-1 | 2% |
| 45 | 152 | TPTE | 0% |
| 46 | 146 | TEKT5 | 0% |
| 47 | 134 | SPO11 | 0% |
| 48 | 68 | LIPI | 0% |
| 49 | 66 | LDHC | 0% |

Esophageal

| | | | |
|---|---|---|---|
| 1 | 1 | 5T4 | 100% |
| 2 | 189 | TTK | 97% |
| 3 | 159 | WT1 | 88% |
| 4 | 36 | EpCAM | 81% |
| 5 | 129 | SP17 | 81% |
| 6 | 75 | MAGE-A4 | 76% |
| 7 | 63 | KOC1 | 74% |
| 8 | 111 | PIWIL1 | 70% |
| 9 | 77 | MAGE-A6 | 68% |
| 10 | 140 | Survivin | 67% |
| 11 | 74 | MAGE-A3 | 66% |
| 12 | 27 | CTCFL | 56% |
| 13 | 79 | MAGE-A9 | 55% |
| 14 | 153 | TRAG-3 | 55% |
| 15 | 73 | MAGE-A2 | 53% |
| 16 | 69 | MAGE-A1 | 46% |
| 17 | 22 | CT46 | 35% |
| 18 | 127 | SLCO6A1 | 33% |
| 19 | 65 | Lage-1 | 31% |
| 20 | 98 | NY-ESO-1 | 31% |
| 21 | 21 | CT45 | 28% |
| 22 | 70 | MAGE-A10 | 27% |
| 23 | 55 | HAGE | 27% |
| 24 | 72 | MAGE-A12 | 26% |
| 25 | 121 | SAGE1 | 22% |
| 26 | 19 | CDCA1 | 22% |
| 27 | 18 | CCDC62 | 21% |
| 28 | 149 | TEX15 | 20% |
| 29 | 177 | HSPB9 | 20% |
| 30 | 95 | NXF2 | 17% |
| 31 | 169 | CABYR | 17% |
| 32 | 179 | KIF20A | 15% |
| 33 | 23 | CT47 | 15% |
| 34 | 85 | MAGE-C1 | 12% |
| 35 | 86 | MAGE-C2 | 11% |
| 36 | 145 | TDRD1 | 10% |
| 37 | 42 | FMR1NB | 8% |
| 38 | 138 | SSX-4 | 7% |
| 39 | 10 | BAGE-1 | 6% |
| 40 | 123 | SCP-1 | 2% |
| 41 | 142 | TAF7L | 0% |
| 42 | 136 | SSX-2 | 0% |
| 43 | 135 | SSX-1 | 0% |
| 44 | 132 | SPAN-Xc | 0% |
| 45 | 44 | FTHL17 | 0% |

[0416] A model population was used that comprises 15,693 subjects with up to 500 male and 500 female subjects from each of a broad range of ethnicities. The full 6 HLA class I and DQ & DRB1 class II alleles is available for each subject. The number of HLA class II bindings was duplicated to simulate the full genome.

[0417] For each of the 15,693 subjects all 15mer amino acid sequences in each TSA were identified that met the following HLA-binding criteria: (i) predicted to bind to at least four HLA class II alleles of the subject (HLA class II-binding PEPI4+); and (ii) comprise a 9mer amino acid sequence that is predicted to bind to at least three HLA class I of the subject (HLA class I-binding PEPI3+).

[0418] A hotspot was identified in the amino acid sequence of each TSA, wherein the hotspot is a 20mer that comprises a 15mer that meets the HLA binding criteria for the maximum number of subjects in the 15,693 subject population. The hotspot analysis is illustrated in FIG. 15.

[0419] The hotspot analysis was repeated in a further 29 cycles, or until no more sequences meeting the HLA-binding criteria could be identified. Hotspot sequences were screened against manufacturing feasibility criteria. Any hotspot sequence that contained a cysteine residue, or that had a calculated hydrophilicity of less than 33%, was rejected and a different hotspot sequence comprising a 15mer that met the HLA binding criteria for the next highest number of subjects was selected instead.

[0420] In each cycle subjects for whom the HLA-binding criteria were met for any hotspot sequence selected in any previous cycle were excluded. In this way the hotspots that were selected maximized, for each cycle, the number of subjects in the population for whom a hotspot sequence had been selected that is predicted to induce both CD4+ and CD8+ T cell responses. The hotspot sequences selected in each cycle and the TSA of which they are a fragment are shown in Table 25. A total of 3286 hotspot sequences were selected. FIG. 16 shows the distribution of hotspot sequence selection across the 192 CTA.

TABLE 25A
Hotspot Sequences and corresponding TAA

| | | | Source | | | | Source |
|---|---|---|---|---|---|---|---|
| | | | Antigen(s) | | | | Antigen(s) |
| | SEQ | | [AA posi- | | SEQ | | [AA posi- |
| Cy- | ID | | tion in | Cy- | ID | | tion in |
| cle | NO | Sequence | Antigen] | cle | NO | Sequence | Antigen] |
| 1 | 1 | PTSSASSFSSSAPFLASAVS | 5T4 | 11 | 1394 | AESMYGDFQEAMTHLQHKLI | FAM46D |
| | | | [34, 53] | | | | [204, 223] |
| 1 | 2 | VESTPMIMENIQELIRSAQE | ACRBP | 11 | 1395 | VAQTSLEEFNVLEMEVMARQ | FATE1 |
| | | | [275, 294] | | | | [121, 140] |
| 1 | 3 | LNWEGVQYLWSFVLENHRRE | ACTL8 | 11 | 1396 | KYRKLIESELSYFVIVYSVM | FBXO39 |
| | | | [73, 92] | | | | [423, 442] |
| 1 | 4 | PHNFRVYSYSGTGIMKPLDQ | ADAM2 | 11 | 1397 | STEPGSFKVDTASNLNSGKE | FSIP1 |
| | | | [67, 86] | | | | [35, 54] |
| 1 | 5 | RIVEIVVVIDNYLYIRYERN | ADAM29 11 | | 1398 | LENFFRYFLALSDDKMEHAQ | FTHL17 |
| | | | [198, 217] | | | | [49, 68] |
| 1 | 6 | RETFMNKFIYEIARRHPFLY | AFP | 11 | 1399 | PVNSQKITLEWASPQNFTSV | GASZ |
| | | | [155, 174] | | | | [382, 401] |
| 1 | 7 | DEVSFYANALTNLVIAMARK | AKAP-3 | 11 | 1400 | NAPLIKPKRALSAARRAGTS | GATA-3 |
| | | | [122, 141] | | | | [298, 317] |
| 1 | 8 | IDDLSFYVNRLSSLVIQMAH | AKAP-4 | 11 | 1401 | EAFEIVVRHAKNYTNAMFKN | Glypican-3 |
| | | | [214, 233] | | | | [113, 132] |
| 1 | 9 | RTKKELASALKSALSGHLET | ANXA2 | 11 | 1402 | QLHDPSGYLAEADLSYTWDF | gp100 |
| | | | [78, 97] | | | | [243, 262] |
| 1 | 10 | ARAVFLALSAQLLQARLMKE | BAGE-1 | 11 | 1403 | IPEELVSMAERFKAHQQKRE | HAGE |
| | | | [3, 22] | | | | [613, 632] |
| 1 | 11 | GVVFLALSAQLLQARLMKEE | BAGE-2 | 11 | 1404 | KQQTDIAVNWAGGLHHAKKS | HDAC1 |
| | | | [4, 23]; | | | | [126, 145] |
| | | | BAGE-3 | | | | |
| | | | [4, 23] | | | | |
| 1 | 12 | GAVFLALSAQLLQARLMKEE | BAGE-5 | 11 | 1405 | HNLLLNYGLYRKMEIYAPHK | HDAC2 |
| | | | [4, 23] | | | | [40, 59] |
| 1 | 13 | NQEYKDAYKFAADVRLMFMN | BRDT | 11 | 1406 | RFHSEDYIDFLQRVSPTNMQ | HDAC3 |
| | | | [328, 347] | | | | [60, 79] |
| 1 | 14 | PSNINQFAAAYFQELTMYRG | CABYR | 11 | 1407 | TLVVTANRGSSPQVMSRSNG | IGFS11 |
| | | | [30, 49] | | | | [371, 390] |
| 1 | 15 | KRASQLASKMHSLLALMVGL | CAGE1 | 11 | 1408 | IRSSYFTFQLQNIVKPLPPV | IL13RA2 |
| | | | [608, 627] | | | | [223, 242] |
| 1 | 16 | QTTQNGRFYAISARFKPFSN | CALR3 | 11 | 1409 | RDYTLRTFGEMADAFKSDYF | JARID1B |
| | | | [67, 86] | | | | [375, 394] |
| 1 | 17 | SPASELIAIQDSHSLGSSKS | CCDC62 | 11 | 1410 | EEIPLKILAHNNFVGRLIGK | KOC1 |
| | | | [566, 585] | | | | [275, 294] |
| 1 | 18 | AKRTSRFLSGIINFIHFREA | CDCA1 | 11 | 1411 | GGLKKLLSFAENSTIPDIQK | KU-CT-1 |
| | | | [114, 133] | | | | [274, 293] |
| 1 | 19 | EGKDPAFTALLTTQLQVQRE | CRISP2 | 11 | 1412 | DLQHGSLFFSTSKITSGKDY | LDHC |
| | | | [20, 39] | | | | [64, 83] |
| 1 | 20 | QGPTAVRKRFFESIIKEAAR | CT45 | 11 | 1413 | VKNTRKVAVSLSVHIKNLLK | LIPI |
| | | | [152, 171] | | | | [147, 166] |
| 1 | 21 | ATAQLQRTPMSALVFPNKIS | CT46 | 11 | 1414 | KVLEYVIKVSARVRFFFPSL | MAGE-A1 |
| | | | [2, 21] | | | | [278, 297] |
| 1 | 22 | LDMVHSLLHRLSHNDHILIE | CT47 | 11 | 1415 | TSLGLTYDGMLSDVQSMPKT | MAGE-A10 |
| | | | [124, 143] | | | | [205, 224] |
| 1 | 23 | GNNFIQNFYLPQNYIDQFLL | CTAGE1 | 11 | 1416 | SFSQDILHDKIIDLVHLLLR | MAGE-A11 |
| | | | [22, 41] | | | | [216, 235] |
| 1 | 24 | FAVLFLWRSFRSVTSRLYVR | CTAGE2 | 11 | 1417 | APEEKIWEELSVLEASDGRE | MAGE-A12 |
| | | | [24, 43] | | | | [216, 235] |
| 1 | 25 | FAVLFFLWRSFRSVRSRLYV | cTAGE5 | 11 | 1418 | ELVHFLLLKYRAREPVTKAE | MAGE-A2 |
| | | | [53, 72] | | | | [115, 134]; |
| | | | | | | | MAGE-A3 |
| | | | | | | | [115, 134] |
| 1 | 26 | HTRFTQSGTMKIHILQKHGE | CTCFL | 11 | 1419 | ESAGPPQSPQGASALPTTIS | MAGE-A4 |
| | | | [404, 423] | | | | [58, 77] |
| 1 | 27 | KKNATMLYTASQAFLRHPDV | CTNNA2 | 11 | 1420 | GSVVGNWQYFFPVIFSKASD | MAGE-A6 |
| | | | [214, 233] | | | | [137, 156] |
| 1 | 28 | NEDNIYISNSIYFSIAIVSE | CXorf48 | 11 | 1421 | TKAEMLESVIKNYKNHFPDI | MAGE-A8 |
| | | | [122, 141] | | | | [134, 153] |
| 1 | 29 | NTGEMSSNSTALALVRPSSS | CXorf61 | 11 | 1422 | EPRKLLTQDWVQENYLEYRQ | MAGE-A9 |
| | | | [27, 46] | | | | [240, 259] |
| 1 | 30 | PPPFFYRRRFVRGPRPPNQQ | DBPC | 11 | 1423 | MLMHFILRKYKMREPIMKAD | MAGE-B1 |
| | | | [225, 244] | | | | [114, 133] |
| 1 | 31 | SRVLHGYAAQQLPSLLKERE | DCAF12 | 11 | 1424 | FGLELNKVNPNGHTYTFIDK | MAGE-B2 |
| | | | [64, 83] | | | | [164, 183] |
| 1 | 32 | NLLRGIDSLFSAPMDFRGLP | DKKL1 | 11 | 1425 | SKMKVLEFWAKVNKTVPSAF | MAGE-B3 |
| | | | [63, 82] | | | | [284, 303] |
| 1 | 33 | IAERQRVMAAQVALRRQQAQ | DMRT1 | 11 | 1426 | FRKVSQRTELVFGLALKEVN | MAGE-B4 |
| | | | [108, 127] | | | | [151, 170] |
| 1 | 34 | GKKIEVYLRLHRHAYPEQRQ | DPPA2 | 11 | 1427 | SASQKAIIFKRLSKDAVKKK | MAGE-B6 |
| | | | [113, 132] | | | | [179, 198] |
| 1 | 35 | SERVRTYWIIIELKHKAREK | EpCAM | 11 | 1428 | LQIPVSPSSSSTLLSLFQSF | MAGE-C1 |
| | | | [136, 155] | | | | [233, 252] |
| 1 | 36 | KGWDLMQNIMNDMPIYMYSV | EPHA2 | 11 | 1429 | KDYFPVILKRAREFMELLFG | MAGE-C2 |
| | | | [50, 69] | | | | [175, 194] |
| 1 | 37 | KRDNRVAYMNPIAMARWRGP | FAM133A | 11 | 1430 | NDVLAMKRSSSLPSWKSLLN | MORC1 |
| | | | [3, 22] | | | | [759, 778] |
| 1 | 38 | RRQFEFSVDSFQIVLDPMLD | FAM46D | 11 | 1431 | AFTKLNNASSRSHSIFTVKI | MPHOSPH1 |
| | | | [166, 185] | | | | [340, 359] |
| 1 | 39 | GENQEHLVIAEMMELGSRSR | FATE1 | 11 | 1432 | RRKNYGQLDIFPARDTYHPM | MUC-1 |
| | | | [26, 45] | | | | [1187, 1206] |
| 1 | 40 | EHLEVKFMNPYNAVLTKKFQ | FBXO39 | 11 | 1433 | RAHLAKNLKLTETQVKIWFQ | NKX3.1 |
| | | | [90, 109] | | | | [154, 173] |
| 1 | 41 | SGSSYFVLANGHILPNSENA | FMR1NB | 11 | 1434 | EKLDAFFGFQLSQEIKQQIH | NLRP4 |
| | | | [92, 111] | | | | [513, 532] |
| 1 | 42 | ISDTKDYFMSKTLGIGRLKR | FSIP1 | 11 | 1435 | QSYSLIHQLLSAEDLEPLGT | NR6A1 |
| | | | [515, 534] | | | | [249, 268] |
| 1 | 43 | GWESGLVAMESAFHLEKNVN | FTHL17 | 11 | 1436 | YLKGELLRRTKRDIVDSLSA | NXF2 |
| | | | [93, 112] | | | | [454, 473] |
| 1 | 44 | EEMRSHYVAQTGILWLLMNN | GAGE-1 | 11 | 1437 | SLVEKTPDEAASLVEGTSDK | NY-BR-1 |
| | | | [109, 128] | | | | [263, 282] |
| 1 | 45 | SRGKSTYYWPRPRRYVQPPE | GAGE-3 | 11 | 1438 | KPAELSRGRGILIFSDFKDF | NYD-TSPG |
| | | | [4, 23] | | | | [212, 231] |
| 1 | 46 | WRGRSTYYWPRPRRYVQPPE | GAGE-6 | 11 | 1439 | EAARRQFQSQLADLQQLPDI | ODF2 |
| | | | [3, 22]; | | | | [583, 602] |
| | | | GAGE-7 | | | | |
| | | | [3, 22] | | | | |
| 1 | 47 | EKFKKAMTIGDVSLVQELLD | GASZ | 11 | 1440 | LTPGPGDYFPEKSTKYVFDS | ODF3 |
| | | | [48, 67] | | | | [99, 118] |
| 1 | 48 | ALSRHMSSLSHISPFSHSSH | GATA-3 | 11 | 1441 | PFQWRITHSFRWMAQVLASE | ODF4 |
| | | | [396, 415] | | | | [67, 86] |
| 1 | 49 | EFVGEFFTDVSLYILGSDIN | Glypican-3 | 11 | 1442 | SVHLAWDLSRSLGAVVFSRV | 0IP5 |
| | | | [143, 162] | | | | [90, 109] |
| 1 | 50 | DGGNKHFLRNQPLTFALQLH | gp100 | 11 | 1443 | EHGDSSAYENVKFIVNVRDI | PASD1 |
| | | | [226, 245] | | | | [118, 137] |
| 1 | 51 | RLNDLQMSNFVNLKNITYLV | HAGE | 11 | 1444 | GTGVNVYLMKRSPRGLSHSP | PBK |
| | | | [375, 394] | | | | [41, 60] |
| 1 | 52 | KPHRIRMTHNLLLNYGLYRK | HDAC1 | 11 | 1445 | TEADRVIQRTNSMQQLEQWI | PEPP2 |
| | | | [31, 50]; | | | | [399, 418] |
| | | | HDAC2 | | | | |
| | | | [32, 51] | | | | |
| 1 | 53 | TIFENLKMLNHAPSVQIHDV | HDAC3 | 11 | 1446 | KRVNTRFFAQSGGRLQNPLP | PIWIL1 |
| | | | [361, 380] | | | | [742, 761] |
| 1 | 54 | KKVNFLDMSLDDIIIYKELE | HOM-TES-85 | 11 | 1447 | AGPIGMRMSPPAWVELKDDR | PIWIL2 |
| | | | [21, 40] | | | | [629, 648] |
| 1 | 55 | LINLNVIWMVTPLSNANQPE | IGFS11 | 11 | 1448 | HDIVNRQKSIAGFVASTNAE | PIWIL3 |
| | | | [52, 71] | | | | [657, 676] |
| 1 | 56 | PIRSSYFTFQLQNIVKPLPP | IL13RA2 | 11 | 1449 | LNKWYKYNHDLPARIIVYRA | PIWIL4 |
| | | | [222, 241] | | | | [674, 693] |
| 1 | 57 | KLRYRYTLDDLYPMMNALKL | JARID1B | 11 | 1450 | KKLKIFAMPMQDIKMILKMV | PRAME |
| | | | [731, 750] | | | | [211, 230] |
| 1 | 58 | PDESWALKAIEALSGKIELH | KOC1 | 11 | 1451 | YSEELFPEELSVVLGTNDLT | PRSS55 |
| | | | [45, 64] | | | | [111, 130] |
| 1 | 59 | IQNHDIMHAIISPLRSANTV | KU-CT-1 | 11 | 1452 | EENSRLLQERGVAYINADSS | PSMA |
| | | | [435, 454] | | | | [436, 455] |
| 1 | 60 | PDSRLLQLHITMPFSSPMEA | Lage-1 | 11 | 1453 | YELIRGRRYPLSEKKIMHYM | RAGE-1 |
| | | | [83, 102] | | | | [90, 109] |
| 1 | 61 | QRNVAIMKSIIPAIVHYSPD | LDHC | 11 | 1454 | RPRRINMTDTGISPMSTRDP | SAGE1 |
| | | | [111, 130] | | | | [226, 245] |
| 1 | 62 | SEELNIILQGNIILSTEKSK | LEMD1 | 11 | 1455 | AIVEAARLEKVHSLFRRQLA | SART3 |
| | | | [67, 86] | | | | [237, 256] |
| 1 | 63 | QKYSAHAFQFSPRNVLWLLV | LIPI | 11 | 1456 | DSDPALQKVNFLPVLEQVGN | SCP-1 |
| | | | [12, 31] | | | | [63, 82] |
| 1 | 64 | VKVLEYVIKVSARVRFFFPS | MAGE-A1 | 11 | 1457 | DVIEGKTAVIEKRRKKRSSA | SCP3a |
| | | | [277, 296] | | | | [41, 60] |
| 1 | 65 | DDTTAMASASSSATGSFSYP | MAGE-A10 | 11 | 1458 | VAFPPRAKDGLVVFGKNSAR | SCRN1 |
| | | | [349, 368] | | | | [11, 30] |
| 1 | 66 | DPTSHSYVLVTSLNLSYDGI | MAGE-A11 | 11 | 1459 | EAQNKELKTQVALSSETPRT | se57-1 |
| | | | [283, 302] | | | | [289, 308] |
| 1 | 67 | ALSRKMAELVHFLLLKYRAR | MAGE-A12 | 11 | 1460 | SSGISFQSKYLSFFILGQTV | SLCO6A1 |
| | | | [108, 127] | | | | [219, 238] |
| 1 | 68 | GREDSVFAHPRKLLMQDLVQ | MAGE-A2 | 11 | 1461 | MITQLISLREQLLAAHDEQK | SOX-6 |
| | | | [233, 252] | | | | [194, 213] |
| 1 | 69 | FPVIFSKASSSLQLVFGIEL | MAGE-A3 | 11 | 1462 | DLNKVILLDPSIIEAKMELE | SPAG1 |
| | | | [147, 166] | | | | [713, 732] |
| 1 | 70 | VNARVRIAYPSLREAALLEE | MAGE-A4 | 11 | 1463 | GGSGAVMSERVSGLAGSIYR | SPAG9 |
| | | | [294, 313] | | | | [14, 33] |
| 1 | 71 | KSPQGASAIPTAIDFTLWRQ | MAGE-A5 | 11 | 1464 | FLPITSSDIDVVESEAVSVL | SPATA19 |
| | | | [63, 82] | | | | [20, 39] |
| 1 | 72 | KKLLTQYFVQENYLEYRQVP | MAGE-A6 | 11 | 1465 | ILSTSKGLIAGNLRYIEEDG | SPO11 |
| | | | [243, 262] | | | | [170, 189] |
| 1 | 73 | RAPEEAIWEALSVMGLYDGR | MAGE-A8 | 11 | 1466 | YMKRKYEAMTKLGFKAILPS | SSX-3 |
| | | | [218, 237] | | | | [50, 69] |
| 1 | 74 | PAQLEFMFQEALKLKVAELV | MAGE-A9 | 11 | 1467 | QKVGSLEPRVEVLINRINEV | SYCE1 |
| | | | [97, 116] | | | | [44, 63] |
| 1 | 75 | DNPSGHTYTLVSKLNLTNDG | MAGE-B1 | 11 | 1468 | TVRNLARSQSVKMKDKLKID | TAF7L |
| | | | [168, 187] | | | | [113, 132] |
| 1 | 76 | SSDPPRFQFLWGPRAYAETS | MAGE-B2 | 11 | 1469 | EVHIVRNGGTSMMVENMAVR | TAG-1 |
| | | | [265, 284] | | | | [997, 1016] |
| 1 | 77 | LIMKTNMLVQFLMEMYKMKK | MAGE-B3 | 11 | 1470 | KLVENSLSISNPGLFTSLGP | TDRD1 |
| | | | [111, 130] | | | | [144, 163] |
| 1 | 78 | SSSVLRDTASSSLAFGIPQE | MAGE-B4 | 11 | 1471 | TLKLRLRETQDTLQLLVMTK | TEKT5 |
| | | | [42, 61] | | | | [428, 447] |
| 1 | 79 | PQILNRTSQHLVVAFGVELK | MAGE-B6 | 11 | 1472 | SREFTNAYKLPLAVGPPSLN | TEX14 |
| | | | [234, 253] | | | | [781, 800] |
| 1 | 80 | RPVSSFFSYTLASLLQSSHE | MAGE-C1 | 11 | 1473 | FRQPIFSQYASHQPLPQATY | TEX15 |
| | | | [777, 796] | | | | [2742, 2761] |
| 1 | 81 | ATVMASESLSVMSSNVSFSE | MAGE-C2 | 11 | 1474 | PSSRILQLSKPKAPATLLEE | THEG |
| | | | [354, 373] | | | | [264, 283] |
| 1 | 82 | EPVVPNAPPAYEKLSAEQSP | MART1 | 11 | 1475 | DLKIQIEMEKKVVFSTISLG | TPTE |
| | | | [94, 113] | | | | [430, 449] |
| 1 | 83 | RSQAGMFIYSNNRLIKMHEK | MORC1 | 11 | 1476 | KVLKSERDKIFLLYEQAQEE | TSGA10 |
| | | | [363, 382] | | | | [55, 74] |
| 1 | 84 | EIYNEYIYDLFVPVSSKFQK | MPHOSPH1 | 11 | 1477 | GAGEAPGALSTADPADQSVQ | TSP50 |
| | | | [277, 296] | | | | [39, 58] |
| 1 | 85 | GVSFFFLSFHISNLQFNSSL | MUC-1 | 11 | 1478 | YEVEAYRRRHHNSSLNFFNW | TSPY1 |
| | | | [1039, 1058] | | | | [241, 260] |
| 1 | 86 | VQPTQKQQKHRLFHWQANSE | NA17-A | 11 | 1479 | YRNGDFFISSKDLGYDYSYL | TYR |
| | | | [45, 64] | | | | [433, 452] |
| 1 | 87 | EEAFSRASLVSVYNSYPYYP | NKX3.1 | 11 | 1480 | ERRFSRSDQLKRHQRRHTGV | WT1 |
| | | | [202, 221] | | | | [361, 380] |
| 1 | 88 | SLLRKKMLPEASLLIAIKPV | NLRP4 | 11 | 1481 | FINHQIIYAGEKNHQYGKSF | ZNF165 |
| | | | [263, 282] | | | | [307, 326] |
| 1 | 89 | IERLIYLYHKFHQLKVSNEE | NR6A1 | 12 | 1482 | LADLSPFAFSGSNASVSAPS | 5T4 |
| | | | [369, 388] | | | | [154, 173] |
| 1 | 90 | QSQGSVLAFTRTFIATPGSS | NXF2 | 12 | 1483 | PKFHSESLSSNPSSFAPRVR | ACRBP |
| | | | [510, 529] | | | | [254, 273] |
| 1 | 91 | KRASQYSGQLKVLIAENTML | NY-BR-1 | 12 | 1484 | WLGASVVAHLSTYQSEWMSR | ACTL8 |
| | | | [1103, 1122] | | | | [338, 357] |
| 1 | 92 | WTLSRFFSYLRSWDVDDLLL | NYD-TSPG | 12 | 1485 | WRVLFLLSGLGGLRMDSNFD | ADAM2 |
| | | | [322, 341] | | | | [2, 21] |
| 1 | 93 | KEFTVSGNILTIRLTAADHR | NY-ESO-1 | 12 | 1486 | VIDNYLYIRYERNDSKLLED | ADAM29 |
| | | | [124, 143] | | | | [205, 224] |
| 1 | 94 | DEKRELAKLARTTNRILASS | ODF1 | 12 | 1487 | KGEEELQKYIQESQALAKRS | AFP |
| | | | [100, 119] | | | | [396, 415] |
| 1 | 95 | ADKDLYVAEALSTLESWRSR | ODF2 | 12 | 1488 | QKATDIMDAMLRKLYNVMFA | AKAP-3 |
| | | | [428, 447] | | | | [368, 387] |
| 1 | 96 | EKSTKYVFDSAPSHSISART | ODF3 | 12 | 1489 | LAKDLIVSALKLIQYHLTQQ | AKAP-4 |
| | | | [109, 128] | | | | [540, 559] |
| 1 | 97 | NSPLPFQWRITHSFRWMAQV | ODF4 | 12 | 1490 | VPHLQKVFDRYKSYSPYDML | ANXA2 |
| | | | [63, 82] | | | | [222, 241] |
| 1 | 98 | ADSVHLAWDLSRSLGAVVFS | OIP5 | 12 | 1491 | YNPPDHEVVTMARMLQDVFE | BRDT |
| | | | [88, 107] | | | | [351, 370] |
| 1 | 99 | MGFLRRLIYRRRPMIYVESS | PAGE1 | 12 | 1492 | DQAPEVTLQADIEVMSTVHI | CABYR |
| | | | [1, 20] | | | | [274, 293] |
| 1 | 100 | GPDMEAFQQELALLKIEDEP | PAGE2 | 12 | 1493 | KEAQEQEFLSLQEEFQKLEK | CAGE1 |
| | | | [65, 84] | | | | [477, 496] |
| 1 | 101 | RGDGQEAPDVVAFVAPGESQ | PAGE4 | 12 | 1494 | SGKINRHEHYFNQFHRRNEL | CALR3 |
| | | | [12, 31] | | | | [365, 384] |
| 1 | 102 | GTDVEAFQQELALLKIEDAP | PAGE5 | 12 | 1495 | EKQDYKQKLKALKIEVNKLK | CCDC62 |
| | | | [84, 103] | | | | [204, 223] |
| 1 | 103 | NHPVRFLQAQPIVPVQRAAE | PASD1 | 12 | 1496 | EEQEEFKQLSDGIQELQQSL | CDCA1 |
| | | | [599, 618] | | | | [175, 194] |
| 1 | 104 | RYKASQDPFPAAIILKVALN | PBK | 12 | 1497 | ALQKKYLRMVVLAVYTNPED | CT46 |
| | | | [130, 149] | | | | [88, 107] |
| 1 | 105 | KEMELWMKAMLDAALVQTEP | PEPP2 | 12 | 1498 | LSGPAELRSFNMPSLDKMDG | CTAGE2 |
| | | | [254, 273] | | | | [603, 622]; |
| | | | | | | | cTAGE5 |
| | | | | | | | [634, 653] |
| 1 | 106 | QYAHKLAFLVGQSIHREPNL | PIWIL1 | 12 | 1499 | AEAKMTFKIFQMNEERLKIA | cTAGE5 |
| | | | [833, 852] | | | | [188, 207] |
| 1 | 107 | RSVVGFVASINLTLTKWYSR | PIWIL2 | 12 | 1500 | FRQKQLLNAHFRKYHDANFI | CTCFL |
| | | | [755, 774] | | | | [523, 542] |
| 1 | 108 | QKSIAGFVASTNAELTKWYS | PIWIL3 | 12 | 1501 | QPFEENEFIDASRLVYDGVR | CTNNA2 |
| | | | [663, 682] | | | | [602, 621] |
| 1 | 109 | RTLNKQGMMMSIATKIAMQM | PIWIL4 | 12 | 1502 | GDYGMIDESIYFSSDVVTGN | CXorf48 |
| | | | [580, 599] | | | | [48, 67] |
| 1 | 110 | KAVSQDMVIYSTEIHYSSKG | PLAC1 | 12 | 1503 | SRDILNNFPHSIARQKRILV | CXorf61 |
| | | | [85, 104] | | | | [63, 82] |
| 1 | 111 | RLDQLLRHVMNPLETLSITN | PRAME | 12 | 1504 | AIKRNNPRKFLRSVGDGETV | DBPC |
| | | | [312, 331] | | | | [125, 144] |
| 1 | 112 | KNTPGIYTSLVNYNLWIEKV | PRSS55 | 12 | 1505 | GAVSLDGYFHLWKAENTLSK | DCAF12 |
| | | | [279, 298] | | | | [268, 287] |
| 1 | 113 | SNPIVLRMMNDQLMFLERAF | PSMA | 12 | 1506 | DAQESSLGLTGLQSLLQGFS | DKKL1 |
| | | | [656, 675] | | | | [37, 56] |
| 1 | 114 | TKFKQSRAMNFDFPFKKGSG | RAGE-1 | 12 | 1507 | GISHPIPLPSAAELLVKREN | DMRT1 |
| | | | [227, 246] | | | | [132, 151] |
| 1 | 115 | GSTGFSSRLAATQDLPFIHQ | RCAS1 | 12 | 1508 | LVISRKKRMAKYEKAEIKEM | EpCAM |
| | | | [123, 142] | | | | [286, 305] |
| 1 | 116 | PPAFINMAATGVSSMSTRDQ | SAGE1 | 12 | 1509 | GVPFRTVSEWLESIKMQQYT | EPHA2 |
| | | | [602, 621] | | | | [903, 922] |
| 1 | 117 | KDSITVFVSNLPYSMQEPDT | SART3 | 12 | 1510 | MSEIRFTNLTWDQVITLDQV | FAM46D |
| | | | [701, 720] | | | | [1, 20] |
| 1 | 118 | NNNIEKMITAFEELRVQAEN | SCP-1 | 12 | 1511 | AVNRRLRALEEQGATWRHRE | FATE1 |
| | | | [215, 234] | | | | [143, 162] |
| 1 | 119 | KLNQEYSQQFLTLFQQWDLD | SCP3a | 12 | 1512 | VESAVWYVKKFGRYLEHLEV | FBXO39 |
| | | | [120, 139] | | | | [75, 94] |
| 1 | 120 | RRHELYKAHEWARAIIESDQ | SCRN1 | 12 | 1513 | KHNQDFIKRNIELAKESRNP | FSIP1 |
| | | | [343, 362] | | | | [249, 268] |
| 1 | 121 | TSELKTEGVSPYLMLIRLRK | se57-1 | 12 | 1514 | TSYLYLSMAFYFNRDDVALE | FTHL17 |
| | | | [316, 335] | | | | [31, 50] |
| 1 | 122 | QSSGISFQSKYLSFFILGQT | SLCO6A1 | 12 | 1515 | SKDQQKILAALKELQVEEIQ | GASZ |
| | | | [218, 237] | | | | [320, 339] |
| 1 | 123 | KERQLSTMITQLISLREQLL | SOX-6 | 12 | 1516 | GPLSVYPPASSSSLSGGHAS | GATA-3 |
| | | | [187, 206] | | | | [128, 147] |
| 1 | 124 | PDNIPAFAAAYFESLLEKRE | SP17 | 12 | 1517 | EELVNGMYRIYDMENVLLGL | Glypican-3 |
| | | | [32, 51] | | | | [304, 323] |
| 1 | 125 | EKDPSLVYQHLLYLSKAERF | SPAG1 | 12 | 1518 | QVSLKVSNDGPTLIGANASF | gp100 |
| | | | [863, 882] | | | | [65, 84] |
| 1 | 126 | RDAVKFFVAVPGQVISPQSS | SPAG9 | 12 | 1519 | TRNDWRVASELINILERANQ | HAGE |
| | | | [1223, 1242] | | | | [592, 611] |
| 1 | 127 | KKMKTSESSTILVVRYRRNV | SPAN-Xc | 12 | 1520 | QLSTGGSVASAVKLNKQQTD | HDAC1 |
| | | | [40, 59] | | | | [111, 130] |
| 1 | 128 | TRIQFIRWSHTRIFQVPSEM | SPATA19 | 12 | 1521 | SDEYIKFLRSIRPDNMSEYS | HDAC2 |
| | | | [112, 131] | | | | [70, 89] |
| 1 | 129 | AEIQALTFLSSDYLSRVYLP | SPO11 | 12 | 1522 | EDYIDFLQRVSPTNMQGFTK | HDAC3 |
| | | | [368, 387] | | | | [64, 83] |
| 1 | 130 | RIQVEHPQMTFGRLHRIIPK | SSX-1 | 12 | 1523 | TESVSHFSDLGQSFSFHSGN | IGFS11 |
| | | | [91, 110] | | | | [332, 351] |
| 1 | 131 | VERPQMTFGRLQGISPKIMP | SSX-2 | 12 | 1524 | LVTATVENETYTLKTTNETR | IL13RA2 |
| | | | [94, 113] | | | | [283, 302] |
| 1 | 132 | QRPQMTFGRLQGIFPKIMPK | SSX-3 | 12 | 1525 | PARRAKRMRAEAMNIKIEPE | JARID1B |
| | | | [95, 114] | | | | [227, 246] |
| 1 | 133 | SEKIVYVYMKLNYEVMTKLG | SSX-4 | 12 | 1526 | KKIRESYENDIASMNLQAHL | KOC1 |
| | | | [43, 62] | | | | [345, 364] |
| 1 | 134 | NQVEHPQMTFGRLQGIFPKI | SSX-5 | 12 | 1527 | KSDNEEVREAAALALANLTT | KU-CT-1 |
| | | | [92, 111] | | | | [366, 385] |
| 1 | 135 | EFEETAKKVRRAIEQLAAMD | Survivin | 12 | 1528 | AIGLSVMDLVGSILKNLRRV | LDHC |
| | | | [123, 142] | | | | [251, 270] |
| 1 | 136 | LFLRSQEAAATVQLFQEEHR | SYCE1 | 12 | 1529 | KPPYSRLDYTDAKFVDVIHS | LIPI |
| | | | [229, 248] | | | | [213, 232] |
| 1 | 137 | ESGQYRANEGTSSIVMEIQK | TAF7L | 12 | 1530 | IFGKASESLQLVFGIDVKEA | MAGE-A1 |
| | | | [377, 396] | | | | [143, 162] |
| 1 | 138 | GADAQYFVYSNESVRPYTPF | TAG-1 | 12 | 1531 | SSPSVVASLPLDQSDEGSSS | MAGE-A10 |
| | | | [765, 784] | | | | [92, 111] |
| 1 | 139 | RGLPASTLSRLSNRLLLRLE | TAG-2a | 12 | 1532 | QNWVQEKYLVYRQVPGTDPA | MAGE-A11 |
| | | | [35, 54] | | | | [361, 380] |
| 1 | 140 | SSEVLEYMNQLSASLKETYA | TDRD1 | 12 | 1533 | QEGPSTFPDLETSFQVALSR | MAGE-A12 |
| | | | [285, 304] | | | | [92, 111] |
| 1 | 141 | LPGYRYLNSWRPSLFYKIAN | TEKT5 | 12 | 1534 | DLESEFQAAISRKMVELVHF | MAGE-A2 |
| | | | [41, 60] | | | | [100, 119] |
| 1 | 142 | LSQFWEFSETTASTVSTTLH | TEX101 | 12 | 1535 | VGNWQYFFPVIFSKASSSLQ | MAGE-A3 |
| | | | [120, 139] | | | | [140, 159] |
| 1 | 143 | RLLKAGVISAQNIYSFGFGK | TEX14 | 12 | 1536 | LEHVVRVNARVRIAYPSLRE | MAGE-A4 |
| | | | [193, 212] | | | | [288, 307] |
| 1 | 144 | GKINQNYASIITEAFPKPKD | TEX15 | 12 | 1537 | VGNWQYFFPVIFSKASDSLQ | MAGE-A6 |
| | | | [368, 387] | | | | [140, 159] |
| 1 | 145 | VSRAAQMAVPSSRILQLSKP | THEG | 12 | 1538 | AASSSSTLIMGTLEEVTDSG | MAGE-A8 |
| | | | [255, 274] | | | | [38, 57] |
| 1 | 146 | SSDRTINLLEVLPWPTEWIF | TMEM31 | 12 | 1539 | EEPSSSVDPAQLEFMFQEAL | MAGE-A9 |
| | | | [63, 82] | | | | [89, 108] |
| 1 | 147 | DLDLTYVTERIIAMSFPSSG | TPTE | 12 | 1540 | ETTKMKVLEFLAKMNGATPR | MAGE-B1 |
| | | | [236, 255] | | | | [279, 298] |
| 1 | 148 | RKDQGFLEKEFYHKTNIKMR | TRAG-3 | 12 | 1541 | AETSKMKVLEFLAKVNGTTP | MAGE-B2 |
| | | | [14, 33] | | | | [281, 300] |
| 1 | 149 | EELQKVQFEKVSALADLSST | TSGA10 | 12 | 1542 | LKKPQRALSTTTSVDVSYKK | MAGE-B3 |
| | | | [492, 511] | | | | [62, 81] |
| 1 | 150 | VIMHSRYRAQRFWSWVGQAN | TSP50 | 12 | 1543 | TTAMTSAYSRATSSSSSQPM | MAGE-B4 |
| | | | [186, 205] | | | | [327, 346] |
| 1 | 151 | KIMLFFRSNPYFQNKVITKE | TSPY1 | 12 | 1544 | RTSQHLVVAFGVELKEMDSS | MAGE-B6 |
| | | | [200, 219] | | | | [239, 258] |
| 1 | 152 | HNRESYMVPFIPLYRNGDFF | TYR | 12 | 1545 | PLQSPVISFSSSTSLSPFSE | MAGE-C1 |
| | | | [420, 439] | | | | [850, 869] |
| 1 | 153 | RGKKGAATKMAAVTAPEAES | VCX | 12 | 1546 | EEEEEASSASSTLYLVFSPS | MAGE-C2 |
| | | | [50, 69] | | | | [34, 53] |
| 1 | 154 | NKRYFKLSHLQMHSRKHTGE | WT1 | 12 | 1547 | ERSQRSQIANITTVWRAQPT | MORC1 |
| | | | [331, 350] | | | | [668, 687] |
| 1 | 155 | VGILHLGSRQKKIRIQLRSQ | XAGE-1 | 12 | 1548 | VQQIQSNYDIAIAELHVQKS | MPHOSPH1 |
| | | | [13, 32]; | | | | [933, 952] |
| | | | XAGE-1b | | | | |
| | | | [13, 32]; | | | | |
| | | | XAGE-1c | | | | |
| | | | [92, 111] | | | | |
| 1 | 156 | SRQKKIRIQLRSQVLGREMR | XAGE-1d | 12 | 1549 | DVSVSDVPFPFSAQSGAGVP | MUC-1 |
| | | | [20, 39] | | | | [1138, 1157] |
| 1 | 157 | MSWRGRSTYRPRPRRSLQPP | XAGE-2 | 12 | 1550 | LSSELGDLEKHSSLPALKEE | NKX3.1 |
| | | | [1, 20] | | | | [184, 203] |
| 1 | 158 | MIWRGRSTYRPRPRRSVPPP | XAGE-3 | 12 | 1551 | YISEMLLRNKSVRYLDLSAN | NLRP4 |
| | | | [1, 20] | | | | [798, 817] |
| 1 | 159 | KSFKSPKLAKHAAVFSGDKT | ZNF165 | 12 | 1552 | EELHRFSDEGMEVIERLIYL | NR6A1 |
| | | | [324, 343] | | | | [356, 375] |
| 2 | 160 | ELASNHFLYLPRDVLAQLPS | 5T4 | 12 | 1553 | VTIPYGIKYDKAWLMNSIQS | NXF2 |
| | | | [216, 235] | | | | [127, 146] |
| 2 | 161 | SHKTPFVSPLLASQSLSIGN | ACRBP | 12 | 1554 | ESLDQKLFQLQSKNMWLQQQ | NY-BR-1 |
| | | | [399, 418] | | | | [1261, 1280] |
| 2 | 162 | NFSVWLGASVVAHLSTYQSE | ACTL8 | 12 | 1555 | YWRTSSFRMTEHNSVKPWQQ | NYD-TSPG |
| | | | [334, 353] | | | | [124, 143] |
| 2 | 163 | EANELLHTFLRWKTSYLVLR | ADAM2 | 12 | 1556 | ELSKSMESMRGHLQAQLRSK | ODF2 |
| | | | [242, 261] | | | | [337, 356] |
| 2 | 164 | IKVKKLLFSKHLPVFTYTDQ | ADAM29 | 12 | 1557 | PINIWIFELERNVSIPIGWS | ODF4 |
| | | | [67, 86] | | | | [163, 182] |
| 2 | 165 | SGEKNIFLASFVHEYSRRHP | AFP | 12 | 1558 | GGTERAIDQASFTTSMEWDT | OIP5 |
| | | | [344, 363] | | | | [22, 41] |
| 2 | 166 | SEGIMTYANSVVSDMMVSIM | AKAP-3 | 12 | 1559 | GPPDPQAFQGPAAYQPDQMR | PASD1 |
| | | | [282, 301] | | | | [735, 754] |
| 2 | 167 | DQVNIDYLMNRPQNLRLEMT | AKAP-4 | 12 | 1560 | PINMEELDESYQKVIELFSV | PBK |
| | | | [161, 180] | | | | [280, 299] |
| 2 | 168 | STPPSAYGSVKAYTNFDAER | ANXA2 | 12 | 1561 | YSPQRTYRSEVSSPIQRGDV | PEPP2 |
| | | | [18, 37] | | | | [556, 575] |
| 2 | 169 | QLLQARLMKEESPVVSWRLE | BAGE-1 | 12 | 1562 | APLISVKPLDNWLLIYTRRN | PIWIL1 |
| | | | [13, 32]; | | | | [485, 504] |
| | | | BAGE-2 | | | | |
| | | | [13, 32]; | | | | |
| | | | BAGE-3 | | | | |
| | | | [13, 32]; | | | | |
| | | | BAGE-5 | | | | |
| | | | [13, 32] | | | | |
| 2 | 170 | TALDVHFVSTLEPLSNAVKR | BAGE-2 | 12 | 1563 | DIPLKQLMVIGMDVYHDPSR | PIWIL2 |
| | | | [37, 56]; | | | | [733, 752] |
| | | | BAGE-3 | | | | |
| | | | [37, 56] | | | | |
| 2 | 171 | KEMLAKKHFSYAWPFYNPVD | BRDT | 12 | 1564 | KRINTRFFLKHGSNFQNPPP | PIWIL3 |
| | | | [281, 300] | | | | [763, 782] |
| 2 | 172 | AKYSSVYMEAEATALLSDTS | CABYR | 12 | 1565 | DYPKIIKVQENPAAFVRAIQ | PIWIL4 |
| | | | [372, 391] | | | | [518, 537] |
| 2 | 173 | ENHPKSMTMMPALFKENRND | CAGE1 | 12 | 1566 | DVMHLSQSPSVSQLSVLSLS | PRAME |
| | | | [756, 775] | | | | [338, 357] |
| 2 | 174 | FSNKGKTLVIQYTVKHEQKM | CALR3 | 12 | 1567 | FKRANMDNDIALLLLASPIK | PRSS55 |
| | | | [84, 103] | | | | [148, 167] |
| 2 | 175 | TVFGEKSVITLSSIFTKDLV | CCDC62 | 12 | 1568 | PRRTILFASWDAEEFGLLGS | PSMA |
| | | | [385, 404] | | | | [412, 431] |
| 2 | 176 | TLSFPRYNVAEIVIHIRNKI | CDCA1 | 12 | 1569 | IGEGTFSEVMKMQSLRDGNY | RAGE-1 |
| | | | [3, 22] | | | | [10, 29] |
| 2 | 177 | PTSWSSAIQSWYDEILDFVY | CRISP2 | 12 | 1570 | RKQDNVLSNVLSGLINMAGA | SAGE1 |
| | | | [104, 123] | | | | [451, 470] |
| 2 | 178 | SPSYQKRQRMALLARKQGAG | CT45 | 12 | 1571 | PIPESVIQNYNKALQQLEKY | SART3 |
| | | | [24, 43] | | | | [276, 295] |
| 2 | 179 | DALQKKYLRMVVLAVYTNPE | CT46 | 12 | 1572 | FVPPRSSSSQVSAVKPQTLG | SCP-1 |
| | | | [87, 106] | | | | [10, 29] |
| 2 | 180 | EEGNEAANFDLAVVARRYPA | CT47 | 12 | 1573 | RKRLEMYTKASLKTSNQKIE | SCP3a |
| | | | [97, 116] | | | | [89, 108] |
| 2 | 181 | FLFGGNNFIQNFYLPQNYID | CTAGE1 | 12 | 1574 | RPRDEVQEVVYFSAADHEPE | SCRN1 |
| | | | [18, 37] | | | | [30, 49] |
| 2 | 182 | ALKKLIHAAKLNASLKTLEG | CTAGE2 | 12 | 1575 | NLVQRMEKEKRTLLERKLSL | se57-1 |
| | | | [282, 301]; | | | | [193, 212] |
| | | | cTAGE5 | | | | |
| | | | [312, 331] | | | | |
| 2 | 183 | MFTSSRMSSFNRHMKTHTSE | CTCFL | 12 | 1576 | IRFGGFRKRKKAKSSVSKKP | SLCO6A1 |
| | | | [263, 282] | | | | [59, 78] |
| 2 | 184 | SSDSSMLDSATSLIQAAKNL | CTNNA2 | 12 | 1577 | QAFPDMHNSNISKILGSRWK | SOX-6 |
| | | | [853, 872] | | | | [641, 660] |
| 2 | 185 | RNGVIDYTIFFTLDSVKLPD | CXorf48 | 12 | 1578 | EKHLQALAPESRALRKDKPA | SPAG1 |
| | | | [188, 207] | | | | [62, 81] |
| 2 | 186 | DLSRDILNNFPHSIARQKRI | CXorf61 | 12 | 1579 | GLAGSIYREFERLIGRYDEE | SPAG9 |
| | | | [61, 80] | | | | [26, 45] |
| 2 | 187 | DKPVLAIQVLGTVKWFNVRN | DBPC | 12 | 1580 | IQDIITSLARNEAPAFTIDN | SPO11 |
| | | | [86, 105] | | | | [55, 74] |
| 2 | 188 | GQGSLLFYDIRAQRFLEERL | DCAF12 | 12 | 1581 | KGERPGAAHQAGPDVLIGQE | SYCE1 |
| | | | [358, 377] | | | | [313, 332] |
| 2 | 189 | TELHPRVAFWIIKLPRRRSH | DKKL1 | 12 | 1582 | VIESLRTLDKKTFYKTADIS | TAF7L |
| | | | [161, 180] | | | | [159, 178] |
| 2 | 190 | SDSTYYSSFYQPSLFPYYNN | DMRT1 | 12 | 1583 | PGNISWTFSSSSLSIKWDPV | TAG-1 |
| | | | [205, 224] | | | | [916, 935] |
| 2 | 191 | MLASWARIAARAVQPKALNS | DPPA2 | 12 | 1584 | SLSISNPGLFTSLGPPLRST | TDRD1 |
| | | | [185, 204] | | | | [149, 168] |
| 2 | 192 | PGQTLIYYVDEKAPEFSMQG | EpCAM | 12 | 1585 | QFTDTNLAFNARISEVTDVK | TEKT5 |
| | | | [244, 263] | | | | [334, 353] |
| 2 | 193 | DLAPDTTYLVQVQALTQEGQ | EPHA2 | 12 | 1586 | KILKKGIYVDAVNSLGQTAL | TEX14 |
| | | | [496, 515] | | | | [41, 60] |
| 2 | 194 | EKEKDVASLSKKAKKSYPDD | FAM133A | 12 | 1587 | SNAAIQIASATMPALSLNND | TEX15 |
| | | | [168, 187] | | | | [598, 617] |
| 2 | 195 | KNLELKFVSSLRRQFEFSVD | FAM46D | 12 | 1588 | SRRVEELSRPKRFYLEYYNN | THEG |
| | | | [155, 174] | | | | [191, 210] |
| 2 | 196 | EVMRRQLYAVNARLRALEEQ | FATE1 | 12 | 1589 | SSGRQSFYRNPIKEVVRFLD | TPTE |
| | | | [135, 154] | | | | [253, 272] |
| 2 | 197 | NLKVNFFFERIMKYERLARI | FBXO39 | 12 | 1590 | TERDVAFTDLRRMTTERDSL | TSGA10 |
| | | | [282, 301] | | | | [103, 122] |
| 2 | 198 | QSLEEDSALEALLNFFFPTT | FMR1NB | 12 | 1591 | FWSWVGQANDIGLLKLKQEL | TSP50 |
| | | | [114, 133] | | | | [197, 216] |
| 2 | 199 | KLQELSAASPTISSFSPRLE | FSIP1 | 12 | 1592 | KVITKEYLVNITEYRASHST | TSPY1 |
| | | | [326, 345] | | | | [214, 233] |
| 2 | 200 | LELYTSYLYLSMAFYFNRDD | FTHL17 | 12 | 1593 | ASPLTGIADASQSSMHNALH | TYR |
| | | | [27, 46] | | | | [348, 367] |
| 2 | 201 | MSWAGASTYRPRRRYVEPP | GAGE-1 | 12 | 1594 | AQFPNHSFKHEDPMGQQGSL | WT1 |
| | | | [1, 20]; | | | | [169, 188] |
| | | | GAGE-2 | | | | |
| | | | [1, 20]; | | | | |
| | | | GAGE-8 | | | | |
| | | | [1, 20] | | | | |
| 2 | 202 | MNLSRGKSTYYWPRPRRYVQ | GAGE-3 | 12 | 1595 | DQSFKWNSDFINHQIIYAGE | ZNF165 |
| | | | [1, 20] | | | | [298, 317] |
| 2 | 203 | MSWRGRSTYYWPRPRRYVQP | GAGE-6 | 13 | 1596 | GYHYRYEINADPRLTNLSSN | 5T4 |
| | | | [1, 20]; | | | | [398, 417] |
| | | | GAGE-7 | | | | |
| | | | [1, 20] | | | | |
| 2 | 204 | DREKDHIFSSYTAFGDLEVF | GASZ | 13 | 1597 | SGWLQTEFLSFQDGDFPTKI | ACRBP |
| | | | [263, 282] | | | | [457, 476] |
| 2 | 205 | GLYYKLHNINRPLTMKKEGI | GATA-3 | 13 | 1598 | GSRVELTPMQRVAPEMFFSP | ACTL8 |
| | | | [343, 362] | | | | [243, 262] |
| 2 | 206 | ELIQKLKSFISFYSALPGYI | Glypican-3 | 13 | 1599 | VNLMQKNFLPHNFRVYSYSG | ADAM2 |
| | | | [390, 409] | | | | [58, 77] |
| 2 | 207 | VLMAVVLASLIYRRRLMKQD | gp100 | 13 | 1600 | FQGILQINDFAYEIKPLAFS | ADAM29 |
| | | | [605, 624] | | | | [123, 142] |
| 2 | 208 | SATWPHSVHRLAQSYLKEPM | HAGE | 13 | 1601 | LIFLLNFTESRTLHRNEYGI | AFP |
| | | | [427, 446] | | | | [9, 28] |
| 2 | 209 | GAGKGKYYAVNYPLRDGIDD | HDAC1 | 13 | 1602 | PPSKKSFFYKEVFESRNGDY | AKAP-3 |
| | | | [215, 234] | | | | [234, 253] |
| 2 | 210 | GAGKGKYYAVNFPMRDGIDD | HDAC2 | 13 | 1603 | SSGKPIPASVVLKRVLLRHT | AKAP-4 |
| | | | [216, 235] | | | | [356, 375] |
| 2 | 211 | QEAFYLTDRVMTVSFHKYGN | HDAC3 | 13 | 1604 | VNILTNRSNAQRQDIAFAYQ | ANXA2 |
| | | | [178, 197] | | | | [57, 76] |
| 2 | 212 | MASFRKLTLSEKVPPNHPSR | HOM-TES-85 | 13 | 1605 | PDSQQQYNVVKTVKVTEQLR | BRDT |
| | | | [1, 20] | | | | [255, 274] |
| 2 | 213 | QVQGTVTIRNISALSSGLYQ | IGFS11 | 13 | 1606 | KTTSGMSKKSVESVKLAQLE | CABYR |
| | | | [195, 214] | | | | [350, 369] |
| 2 | 214 | QLQNIVKPLPPVYLTFTRES | IL13RA2 | 13 | 1607 | SNLYLEKRVKELQMKITKQQ | CAGE1 |
| | | | [231, 250] | | | | [329, 348] |
| 2 | 215 | RGHYERILNPYNLFLSGDSL | JARID1B | 13 | 1608 | KMKNTDYLTQYDLSEFENIG | CALR3 |
| | | | [172, 191] | | | | [279, 298] |
| 2 | 216 | YENDIASMNLQAHLIPGLNL | KOC1 | 13 | 1609 | APGHMSDVEWMSIFKPSKMQ | CCDC62 |
| | | | [351, 370] | | | | [525, 544] |
| 2 | 217 | ATVLTNMAMQEPLRLNIQNH | KU-CT-1 | 13 | 1610 | RYNVAEIVIHIRNKILTGAD | CDCA1 |
| | | | [419, 438] | | | | [8, 27] |
| 2 | 218 | GAVLKDFTVSGNLLFMSVRD | Lage-1 | 13 | 1611 | KTRSGKVFQNKMANGNQPVK | CT46 |
| | | | [120, 139] | | | | [333, 352] |
| 2 | 219 | WAIGLSVMDLVGSILKNLRR | LDHC | 13 | 1612 | SETRASLYPPTLLEGPLRLS | CTAGE2 |
| | | | [250, 269] | | | | [498, 517] |
| 2 | 220 | LPSTRKLYEKKLVQLLVSPP | LEMD1 | 13 | 1613 | SETRAFLSPPTLLEGPLRLS | cTAGE5 |
| | | | [27, 46] | | | | [529, 548] |
| 2 | 221 | AQFYNDFVNISSIGLTYFQS | LIPI | 13 | 1614 | QLLAERTKEQLFFVETMSGD | CTCFL |
| | | | [409, 428] | | | | [190, 209] |
| 2 | 222 | VSARVRFFFPSLREAALREE | MAGE-A1 | 13 | 1615 | GAIRGRAARVIHIINAEMEN | CTNNA2 |
| | | | [286, 305] | | | | [541, 560] |
| 2 | 223 | LESVIRNYEDHFPLLFSEAS | MAGE-A10 | 13 | 1616 | GLINSNTDNNLAVYDLSRDI | CXorf61 |
| | | | [161, 180] | | | | [47, 66] |
| 2 | 224 | YAGREHFLFGEPKRLLTQNW | MAGE-A11 | 13 | 1617 | LHKRKRLPPVKRSLVYYLKN | DCAF12 |
| | | | [344, 363] | | | | [33, 52] |
| 2 | 225 | SVIRNFQDFFPVIFSKASEY | MAGE-A12 | 13 | 1618 | LFSAPMDFRGLPGNYHKEEN | DKKL1 |
| | | | [138, 157] | | | | [71, 90] |
| 2 | 226 | PDLESEFQAAISRKMVELVH | MAGE-A2 | 13 | 1619 | VENTPDLVSDSTYYSSFYQP | DMRT1 |
| | | | [99, 118] | | | | [197, 216] |
| 2 | 227 | VVGNWQYFFPVIFSKASSSL | MAGE-A3 | 13 | 1620 | YQLDPKFITSILYENNVITI | EpCAM |
| | | | [139, 158] | | | | [174, 193] |
| 2 | 228 | ETSYVKVLEHVVRVNARVAI | MAGE-A4 | 13 | 1621 | AGMKYLANMNYVHRDLAARN | EPHA2 |
| | | | [281, 300]; | | | | [725, 744] |
| | | | MAGE-A8 | | | | |
| | | | [283, 302] | | | | |
| 2 | 229 | ESVFRAALSKKVADLIHFLL | MAGE-A5 | 13 | 1622 | WSLISLSNNTGKNLELKFVS | FAM46D |
| | | | [102, 121] | | | | [144, 163] |
| 2 | 230 | VVGNWQYFFPVIFSKASDSL | MAGE-A6 | 13 | 1623 | KAAGSASAKRVWNMTATRPK | FATE1 |
| | | | [139, 158] | | | | [57, 76] |
| 2 | 231 | DGREHSVYWKLRKLLTQEWV | MAGE-A8 | 13 | 1624 | FYFKIWAFLDVSFVERILKS | FBXO39 |
| | | | [235, 254] | | | | [369, 388] |
| 2 | 232 | AHAETSYEKVINYLVMLNAR | MAGE-A9 | 13 | 1625 | SKTLGIGRLKRPSFLDDPLY | FSIP1 |
| | | | [276, 295] | | | | [524, 543] |
| 2 | 233 | TEEEIWKFMNVLGAYDGEEH | MAGE-B1 | 13 | 1626 | EHMTDLLKERDITLAHLLTM | GASZ |
| | | | [216, 235] | | | | [289, 308] |
| 2 | 234 | QFLWGPRAYAETSKMKVLEF | MAGE-B2 | 13 | 1627 | YGNSVRATVQRYPPTHHGSQ | GATA-3 |
| | | | [272, 291] | | | | [64, 83] |
| 2 | 235 | TNKKKVSFSSPLILGATIQK | MAGE-B3 | 13 | 1628 | SLQVTRIFLQALNLGIEVIN | Glypican-3 |
| | | | [33, 52] | | | | [222, 241] |
| 2 | 236 | SLTRKTKMLVQFLLYKYKMK | MAGE-B4 | 13 | 1629 | VLPDGQVIWVNNTIINGSQV | gp100 |
| | | | [108, 127] | | | | [96, 115] |
| 2 | 237 | GPRAYAETTKMRVLTVLADS | MAGE-B6 | 13 | 1630 | ALKSHFVGAVIGRGGSKIKN | HAGE |
| | | | [360, 379] | | | | [73, 92] |
| 2 | 238 | NPASSFFSSALLSIFQSSPE | MAGE-C1 | 13 | 1631 | SDDYIKFLRSIRPDNMSEYS | HDAC1 |
| | | | [130, 149] | | | | [69, 88] |
| 2 | 239 | SSASSTLYLVFSPSSFSTSS | MAGE-C2 | 13 | 1632 | QLSTGGSVAGAVKLNRQQTD | HDAC2 |
| | | | [40, 59] | | | | [112, 131] |
| 2 | 240 | NAPPAYEKLSAEQSPPPYSP | MART1 | 13 | 1633 | NHAPSVQIHDVPADLLTYDR | HDAC3 |
| | | | [99, 118] | | | | [370, 389] |
| 2 | 241 | DDPQKFAMELSIIYKYSPFK | MORC1 | 13 | 1634 | QPEQVILYQGGQMFDGAPRF | IGFS11 |
| | | | [159, 178] | | | | [69, 88] |
| 2 | 242 | YEQANLNMANSIKFSVWVSF | MPHOSPH1 | 13 | 1635 | QHRAQQLLSSGNLKFVQDRV | JARID1B |
| | | | [256, 275] | | | | [1263, 1282] |
| 2 | 243 | NIKFRPGSVVVQLTLAFREG | MUC-1 | 13 | 1636 | LENFTLKVAYIPDEMAAQQN | KOC1 |
| | | | [1091, 1110] | | | | [144, 163] |
| 2 | 244 | HRLFHWQANSERADIPASLR | NA17-A | 13 | 1637 | AAEADGIDPLINLLSSKRDG | KU-CT-1 |
| | | | [54, 73] | | | | [394, 413] |
| 2 | 245 | PQKRSRAAFSHTQVIELERK | NKX3.1 | 13 | 1638 | LKDLADELALVDVALDKLKG | LDHC |
| | | | [123, 142] | | | | [41, 60] |
| 2 | 246 | GINNVSFSGQSVLLFEVLFY | NLRP4 | 13 | 1639 | DMNVIVVDWSRGATTFIYNA | LIPI |
| | | | [673, 692] | | | | [126, 145] |
| 2 | 247 | IPHLFSYSGHSPLLPQQARS | NR6A1 | 13 | 1640 | GEPRKLLTQDLVQEKYLEYR | MAGE-A1 |
| | | | [226, 245] | | | | [233, 252] |
| 2 | 248 | QEMVQAFSAQSGMKLEWSQK | NXF2 | 13 | 1641 | QSETQGLEGAQAPLAVEEDA | MAGE-A10 |
| | | | [573, 592] | | | | [19, 38] |
| 2 | 249 | SVVAKLLSHGAVIEVHNKAS | NY-BR-1 | 13 | 1642 | LLLRKYRVKGLITKAEMLGS | MAGE-A11 |
| | | | [97, 116] | | | | [232, 251] |
| 2 | 250 | NAEDWNLYWRTSSFRMTEHN | NYD-TSPG | 13 | 1643 | TKAEMLGSVIRNFQDFFPVI | MAGE-A12 |
| | | | [117, 136] | | | | [131, 150] |
| 2 | 251 | AMPFATPMEAELARRSLAQD | NY-ESO-1 | 13 | 1644 | KPEEGLEARGEALGLVGAQA | MAGE-A2 |
| | | | [93, 112] | | | | [11, 30] |
| 2 | 252 | LRPSLRSLERKAIRAIEDEK | ODF1 | 13 | 1645 | EEGPSTFPDLESEFQAALSR | MAGE-A3 |
| | | | [83, 102] | | | | [92, 111]; |
| | | | | | | | MAGE-A6 |
| | | | | | | | [92, 111] |
| 2 | 253 | GDGPYSTFLTSSPIRSRSPP | ODF2 | 13 | 1646 | EEGVEAQEEALGLVGAQAPT | MAGE-A4 |
| | | | [809, 828] | | | | [13, 32] |
| 2 | 254 | DVRVTKFKAPQYTMAARVEP | ODF3 | 13 | 1647 | PAHLESLFREALDEKVAELV | MAGE-A8 |
| | | | [189, 208] | | | | [101, 120] |
| 2 | 255 | LGQDGRLLSSTLSLSSNRSL | ODF4 | 13 | 1648 | KEPVTKAEMLESVIKNYKRY | MAGE-A9 |
| | | | [39, 58] | | | | [126, 145] |
| 2 | 256 | RSLGAVVFSRVTNNVVLEAP | OIP5 | 13 | 1649 | GEPRKFITQDLVQEKYLKYE | MAGE-B1 |
| | | | [99, 118] | | | | [239, 258] |
| 2 | 257 | NDQESSQPVGSVIVQEPTEE | PAGE2 | 13 | 1650 | GEPWKLITKDLVQEKYLEYK | MAGE-B2 |
| | | | [16, 35] | | | | [242, 261] |
| 2 | 258 | MSARVRSRSRGRGDGQEAPD | PAGE4 | 13 | 1651 | QSRTDPLIMKTNMLVQFLME | MAGE-B3 |
| | | | [1, 20] | | | | [105, 124] |
| 2 | 259 | RGNDQESSQPVGPVIVQQPT | PAGE5 | 13 | 1652 | AREEEIWEFLNMLGIYDGKR | MAGE-B4 |
| | | | [33, 52] | | | | [215, 234] |
| 2 | 260 | SSQRKLNWIPSFPTYDYFNQ | PASD1 | 13 | 1653 | TKMRVLRVLADSSNTSPGLY | MAGE-B6 |
| | | | [16, 35] | | | | [368, 387] |
| 2 | 261 | LTLWEMMTLSIPHINLSNDD | PBK | 13 | 1654 | STFEGFAQSSLQIPVSPSFS | MAGE-C1 |
| | | | [235, 254] | | | | [258, 277] |
| 2 | 262 | GWEEAYTFEGARYYINHNER | PEPP2 | 13 | 1655 | SEEVIWEVLNAVGVYAGREH | MAGE-C2 |
| | | | [61, 80] | | | | [245, 264] |
| 2 | 263 | NSLIQNLFKVTPAMGMQMRK | PIWIL1 | 13 | 1656 | KLREILLYFFPEHQLPSELE | MORC1 |
| | | | [509, 528] | | | | [824, 843] |
| 2 | 264 | LVGRNFYDPTSAMVLQQHRL | PIWIL2 | 13 | 1657 | QQHVPFRESKLTHYFQSFFN | MPHOSPH1 |
| | | | [338, 357] | | | | [426, 445] |
| 2 | 265 | LRYYNILFRRTFKLLDFEQV | PIWIL3 | 13 | 1658 | ETQFNQYKTEAASRYNLTIS | MUC-1 |
| | | | [222, 241] | | | | [1118, 1137] |
| 2 | 266 | YIPDLASRRLRIALLYSHSE | PIWIL4 | 13 | 1659 | TTLLMKLMMAWSDNKIFRDR | NLRP4 |
| | | | [130, 149] | | | | [162, 181] |
| 2 | 267 | GIRAKAVSQDMVIYSTEIHY | PLAC1 | 13 | 1660 | LTVYSKQIFGELADVTAKYS | NR6A1 |
| | | | [81, 100] | | | | [333, 352] |
| 2 | 268 | SPEKEEQYIAQFTSQFLSLQ | PRAME | 13 | 1661 | MAATLKIIERNFPELLSLNL | NXF2 |
| | | | [277, 296] | | | | [258, 277] |
| 2 | 269 | DFKRANMDNDIALLLLASPI | PRSS55 | 13 | 1662 | GFHHIHEQIMEYIRKLSKNH | NY-BR-1 |
| | | | [147, 166] | | | | [193, 212] |
| 2 | 270 | QSGAAVVHEIVRSFGTLKKE | PSMA | 13 | 1663 | DDNLKPWLLEVNYSPALTLD | NYD-TSPG |
| | | | [389, 408] | | | | [377, 396] |
| 2 | 271 | VVRLSSYSSPTLQSVLGSGT | RAGE-1 | 13 | 1664 | ELERKLEATSAQNIEFLQVI | ODF2 |
| | | | [357, 376] | | | | [668, 687] |
| 2 | 272 | QLEPDYFKDMTPTIRKTQKI | RCAS1 | 13 | 1665 | NRSLGQRQNSPLPFQWRITH | ODF4 |
| | | | [89, 108] | | | | [55, 74] |
| 2 | 273 | RQFVEFTIKEAARFKKVVLI | SAGE1 | 13 | 1666 | PSSPVAYDIISQELELMKKL | PASD1 |
| | | | [860, 879] | | | | [361, 380] |
| 2 | 274 | KELEELRAAFTRALEYLKQE | SART3 | 13 | 1667 | NDLIEERYKASQDPFPAAII | PBK |
| | | | [440, 459] | | | | [124, 143] |
| 2 | 275 | QHKIAEMVALMEKHKHQYDK | SCP-1 | 13 | 1668 | IPTSPSHGSIAAYQGYSPQR | PEPP2 |
| | | | [704, 723] | | | | [541, 560] |
| 2 | 276 | METQQQEIASVRKSLQSMLF | SCP3a | 13 | 1669 | KVLRSETVLDFMFNFYHQTE | PIWIL1 |
| | | | [217, 236] | | | | [272, 291] |
| 2 | 277 | DSEFFLTTASGVSVLPQNRS | SCRN1 | 13 | 1670 | SQVVNVRTIGQPTRLRSVAQ | PIWIL2 |
| | | | [268, 287] | | | | [696, 715] |
| 2 | 278 | EISILQEQISHLQFVIHSQH | se57-1 | 13 | 1671 | LLANHFRVISRPQWVAYKYN | PIWIL3 |
| | | | [235, 254] | | | | [127, 146] |
| 2 | 279 | KKHRYLRLLPEALIRFGGFR | SLCO6A1 | 13 | 1672 | QYDITVSDLNQPMLVSLLKK | PIWIL4 |
| | | | [46, 65] | | | | [343, 362] |
| 2 | 280 | SEPHIKRPMNAFMVWAKDER | SOX-6 | 13 | 1673 | RRLWGSIQSRYISMSVWTSP | PRAME |
| | | | [617, 636] | | | | [4, 23] |
| 2 | 281 | KEEVAAVKIQAAFRGHIARE | SP17 | 13 | 1674 | VTQLEGRPFNAEKRRTSVKQ | PRSS55 |
| | | | [113, 132] | | | | [298, 317] |
| 2 | 282 | YYTRSISALPTVVAYNNRAQ | SPAG1 | 13 | 1675 | RLQDFDKSNPIVLRMMNDQL | PSMA |
| | | | [231, 250] | | | | [649, 668] |
| 2 | 283 | REEAQKMSSLLPTMWLGAQN | SPAG9 | 13 | 1676 | KLKLSGVVRLSSYSSPTLQS | RAGE-1 |
| | | | [959, 978] | | | | [351, 370] |
| 2 | 284 | NPLQMEEEEFMEIMVEIPAK | SPAN-Xc | 13 | 1677 | NNQPQPSYDLSTVLPGLTYL | SAGE1 |
| | | | [78, 97] | | | | [542, 561] |
| 2 | 285 | KGVGLPFLPITSSDIDVVES | SPATA19 | 13 | 1678 | FRYSTSLEKHKLFISGLPFS | SART3 |
| | | | [14, 33] | | | | [792, 811] |
| 2 | 286 | KSAQKFSLILKILSMIYKLV | SPO11 | 13 | 1679 | MEKQKPFALFVPPRSSSSQV | SCP-1 |
| | | | [106, 125] | | | | [1, 20] |
| 2 | 287 | EKISYVYMKRNYKAMTKLGF | SSX-1 | 13 | 1680 | LQQSRIVQSQRLKTIKQLYE | SCP3a |
| | | | [44, 63] | | | | [161, 180] |
| 2 | 288 | EWEKMKASEKIFYVYMKRKY | SSX-2 | 13 | 1681 | TGEGEFNFSEVFSPVEDHLD | SCRN1 |
| | | | [36, 55] | | | | [215, 234] |
| 2 | 289 | EKIVYVYMKRKYEAMTKLGF | SSX-3 | 13 | 1682 | KQEDSKQLLQVNKLEKEQKL | se57-1 |
| | | | [44, 63] | | | | [148, 167] |
| 2 | 290 | VERPQMTFGSLQRIFPKIMP | SSX-4 | 13 | 1683 | LLPEALIRFGGFRKRKKAKS | SLCO6A1 |
| | | | [94, 113] | | | | [53, 72] |
| 2 | 291 | EKIIYVYMKRKYEAMTKLGF | SSX-5 | 13 | 1684 | AAASGLSPLQLQKGHVSHPQ | SOX-6 |
| | | | [44, 63] | | | | [315, 334] |
| 2 | 292 | QPFLKDHRISTFKNWPFLEG | Survivin | 13 | 1685 | LKNNLIEKDPSLVYQHLLYL | SPAG1 |
| | | | [11, 30] | | | | [857, 876] |
| 2 | 293 | EPRVEVLINRINEVQQAKKK | SYCE1 | 13 | 1686 | GQGENKMKNLPVPVYLRPLD | SPAG9 |
| | | | [50, 69] | | | | [660, 679] |
| 2 | 294 | NLTLKNHFQSVLEQLELQEK | TAF7L | 13 | 1687 | MLKVSRRSLHILSTSKGLIA | SPO11 |
| | | | [424, 443] | | | | [160, 179] |
| 2 | 295 | AEDTRLFAPSIKARFPAETY | TAG-1 | 13 | 1688 | GQDTSSQKIEDLMEMVQKLQ | SYCE1 |
| | | | [231, 250] | | | | [25, 44] |
| 2 | 296 | NLEPLVSRDPPASASLFQDT | TAG-2a | 13 | 1689 | VWKHGITPPLKNVRKKRFRK | TAF7L |
| | | | [64, 83] | | | | [217, 236] |
| 2 | 297 | WAERIMFSDLRSLQLKKTME | TDRD1 | 13 | 1690 | NPVGTVVSREAILRFGFLQE | TAG-1 |
| | | | [246, 265] | | | | [115, 134] |
| 2 | 298 | TLQEIFQAENTIMLLERSIM | TEKT5 | 13 | 1691 | KVLLDAGFAVGEQSMVTDKP | TDRD1 |
| | | | [363, 382] | | | | [665, 684] |
| 2 | 299 | NDKDSLSQFWEFSETTASTV | TEX101 | 13 | 1692 | QEQMRKLAQRIDIQMRDNRD | TEKT5 |
| | | | [115, 134] | | | | [225, 244] |
| 2 | 300 | KSDIYSFSMIMQEILTDDIP | TEX14 | 13 | 1693 | QAKATQFNSALFTLSSHRQG | TEX14 |
| | | | [436, 455] | | | | [875, 894] |
| 2 | 301 | TLVELQMMMETIQFIENKKR | TEX15 | 13 | 1694 | PQAKEMFIDTVISSYNIETA | TEX15 |
| | | | [1689, 1708] | | | | [389, 408] |
| 2 | 302 | VTKKVVASPRIISLAKPKVR | THEG | 13 | 1695 | NEGYDRRPLASMSLPPPKAS | THEG |
| | | | [326, 345] | | | | [349, 368] |
| 2 | 303 | RRTPTTSSDRTINLLEVLPW | TMEM31 | 13 | 1696 | RQQYFSDLFNILDTAIIVIL | TPTE |
| | | | [57, 76] | | | | [150, 169] |
| 2 | 304 | SKIKKIVHSIVSSFAFGLFG | TPTE | 13 | 1697 | KSPKSTTAHAILRRVETERD | TSGA10 |
| | | | [79, 98] | | | | [87, 106] |
| 2 | 305 | MWMGLIQLVEGVKRKDQGFL | TRAG-3 | 13 | 1698 | LSKADGMWPQFRTIQEKEVI | TSP50 |
| | | | [1, 20] | | | | [247, 266] |
| 2 | 306 | RQNYSSNAYHMSSTMKPNTK | TSGA10 | 13 | 1699 | ASAKEGTAFRMEAVQEGAAG | TSPY1 |
| | | | [650, 669] | | | | [32, 51] |
| 2 | 307 | SSRPRLLWQTPTTQTLPSTT | TSP50 | 13 | 1700 | FVDSIFEQWLRRHRPLQEVY | TYR |
| | | | [67, 86] | | | | [392, 411] |
| 2 | 308 | DEDEDMLSYMVSLEVGEEKH | TSPY1 | 13 | 1701 | PPPHSFIKQEPSWGGAEPHE | WT1 |
| | | | [175, 194] | | | | [66, 85] |
| 2 | 309 | HNALHIYMNGTMSQVQGSAN | TYR | 13 | 1702 | SQSSNLSQHQRIHMRENLLM | ZNF165 |
| | | | [363, 382] | | | | [466, 485] |
| 2 | 310 | VAKKGKAVRRGRRGKKGAAT | VCX | 14 | 1703 | THLESLHLEDNALKVLHNGT | 5T4 |
| | | | [38, 57] | | | | [258, 277] |
| 2 | 311 | PSQASSGQARMFPNAPYLPS | WT1 | 14 | 1704 | SPISPHFTVTERQTFQPWPE | ACRBP |
| | | | [117, 136] | | | | [151, 170] |
| 2 | 312 | KKKNQQLKVGILHLGSRQKK | XAGE-1 | 14 | 1705 | GFTKRLFRELMGDHVSSTKA | ACTL8 |
| | | | [5, 24]; | | | | [306, 325] |
| | | | XAGE-1b | | | | |
| | | | [5, 24]; | | | | |
| | | | XAGE-1c | | | | |
| | | | [84, 103]; | | | | |
| | | | XAGE-1d | | | | |
| | | | [5, 24] | | | | |
| 2 | 313 | PRRSLQPPELIGAMLEPTDE | XAGE-2 | 14 | 1706 | DFAKYIEMHVIVEKQLYNHM | ADAM2 |
| | | | [13, 32] | | | | [175, 194] |
| 2 | 314 | GRAFNLNSHLIRHQRIHTRE | ZNF165 | 14 | 1707 | EDLYVIVNIVDSILDVIGVK | ADAM29 |
| | | | [406, 425] | | | | [223, 242] |
| 3 | 315 | DGRLRLARLALVLLGWVSSS | 5T4 | 14 | 1708 | KAPQLTSSELMAITRKMAAT | AFP |
| | | | [13, 32] | | | | [438, 457] |
| 3 | 316 | RNQNPGSLLQLPHTEALLVL | ACRBP | 14 | 1709 | ERQLNEAVGNVTPLQLLDWL | AKAP-3 |
| | | | [309, 328] | | | | [830, 849] |
| 3 | 317 | DRKKMLEILFELLHVPSVLL | ACTL8 | 14 | 1710 | QWKQNATDIMEAMLKRLVSA | AKAP-4 |
| | | | [110, 129] | | | | [414, 433] |
| 3 | 318 | RRYIENIYHSKPMRWPFFLF | ADAM2 | 14 | 1711 | KIRSEFKRKYGKSLYYYIQQ | ANXA2 |
| | | | [673, 692] | | | | [302, 321] |
| 3 | 319 | EIKPLAFSTTFEHLVYKMDS | ADAM29 | 14 | 1712 | KNGRLTNQLQYLQKVVLKDL | BRDT |
| | | | [135, 154] | | | | [24, 43] |
| 3 | 320 | QKLGEYYLQNAFLVAYTKKA | AFP | 14 | 1713 | LSGEAAEAVHSGTSVKSSSG | CABYR |
| | | | [420, 439] | | | | [451, 470] |
| 3 | 321 | SVVSDMMVSIMKTLKIQVKD | AKAP-3 | 14 | 1714 | SDTMNVSNLSQGVMLSHSPI | CAGE1 |
| | | | [291, 310] | | | | [33, 52] |
| 3 | 322 | LDSQKMDMSNIVLMLIQKLL | AKAP-4 | 14 | 1715 | GFDIKKVHVILHFKNKYHEN | CALR3 |
| | | | [619, 638] | | | | [138, 157] |
| 3 | 323 | RDKVLIRIMVSRSEVDMLKI | ANXA2 | 14 | 1716 | SDLQFLNFNVENSQELIQMY | CCDC62 |
| | | | [284, 303] | | | | [294, 313] |
| 3 | 324 | QARLMKEESPVVSWRLEPED | BAGE-1 | 14 | 1717 | TYMEFLWQYKSSADKMQQLN | CDCA1 |
| | | | [16, 35]; | | | | [137, 156] |
| | | | BAGE-2 | | | | |
| | | | [16, 35]; | | | | |
| | | | BAGE-3 | | | | |
| | | | [16, 35]; | | | | |
| | | | BAGE-5] | | | | |
| | | | [16, 35] | | | | |
| 3 | 325 | FVQNTLTKLLKDRRKMQTVQ | BAGE-2 | 14 | 1718 | TILSPKQIKTPFQKILRDKD | CT46 |
| | | | [82, 101]; | | | | [239, 258] |
| | | | BAGE-3 | | | | |
| | | | [82, 101] | | | | |
| 3 | 326 | LKDLWKHSFSWPFQRPVDAV | BRDT | 14 | 1719 | QQKLKVMTELYQENEMKLYR | CTAGE2 |
| | | | [40, 59] | | | | [349, 368] |
| 3 | 327 | QADIEVMSTVHISSVYNDVP | CABYR | 14 | 1720 | SEQDELMADISKRIQSLEDE | cTAGE5 |
| | | | [282, 301] | | | | [160, 179] |
| 3 | 328 | SRLEKLLTQVRNLQFMSENE | CAGE1 | 14 | 1721 | MSLLSIQQQEGVQVVVQQPG | CTCFL |
| | | | [507, 526] | | | | [97, 116] |
| 3 | 329 | HLYTLILRPDLSYDVKIDGQ | CALR3 | 14 | 1722 | GPLKNTSDVINAAKKIAEAG | CTNNA2 |
| | | | [170, 189] | | | | [733, 752] |
| 3 | 330 | NSPTSLLIYKDAPAFNEKAS | CCDC62 | 14 | 1723 | HAIELNPSRTLLATGGDNPN | DCAF12 |
| | | | [600, 619] | | | | [144, 163] |
| 3 | 331 | RETYMEFLWQYKSSADKMQQ | CDCA1 | 14 | 1724 | TLSSHLQIDKMTDNKTGEVL | DKKL1 |
| | | | [135, 154] | | | | [99, 118] |
| 3 | 332 | GENLYMSSDPTSWSSAIQSW | CRISP2 | 14 | 1725 | VKNSLRGLPGPYVPGQTGNQ | DMRT1 |
| | | | [95, 114] | | | | [253, 272] |
| 3 | 333 | GQKYEKIFEMLEGVQGPTAV | CT45 | 14 | 1726 | DVDIADVAYYFEKDVKGESL | EpCAM |
| | | | [138, 157] | | | | [206, 225] |
| 3 | 334 | YQFKFKYTNNGPLMDFISKN | CT46 | 14 | 1727 | ERSVGPLTRKGFYLAFQDIG | EPHA2 |
| | | | [115, 134] | | | | [167, 186] |
| 3 | 335 | LGEEEGEQAAGLAAVPRGGS | CT47 | 14 | 1728 | KEKLSPDIMKDAYVQKLVKV | FAM46D |
| | | | [61, 80] | | | | [118, 137] |
| 3 | 336 | QNFYLPQNYIDQFLLTSFPT | CTAGE1 | 14 | 1729 | FNVLEMEVMRRQLYAVNRRL | FATE1 |
| | | | [27, 46] | | | | [129, 148] |
| 3 | 337 | LYVRREKKFAVALSGLIEEK | CTAGE2 | 14 | 1730 | KFMNPYNAVLTKKFQVTMRG | FBXO39 |
| | | | [40, 59] | | | | [95, 114] |
| 3 | 338 | TERLLKMKDWAAMLGEDITD | cTAGE5 | 14 | 1731 | DIEDVTPVFPQLSRSIISKL | FSIP1 |
| | | | [268, 287] | | | | [433, 452] |
| 3 | 339 | SEAVELQDMSLLSIQQQEGV | CTCFL | 14 | 1732 | LREEVSTWNSRILKRTAITI | GASZ |
| | | | [89, 108] | | | | [439, 458] |
| 3 | 340 | SVKRGTMVRAARALLSAVTR | CTNNA2 | 14 | 1733 | GSHHTASPWNLSPFSKTSIH | GATA-3 |
| | | | [117, 136] | | | | [104, 123] |
| 3 | 341 | SNSIYFSIAIVSEDFVPYKG | CXorf48 | 14 | 1734 | KVKNQLRFLAELAYDLDVDD | Glypican-3 |
| | | | [129, 148] | | | | [515, 534] |
| 3 | 342 | IVFWKYRRFQRNTGEMSSNS | CXorf61 | 14 | 1735 | PDASSIMSTESITGSLGPLL | gp100 |
| | | | [16, 35] | | | | [439, 458] |
| 3 | 343 | DTKEDVFVHQTAIKRNNPRK | DBPC | 14 | 1736 | HDVTHVYNFDFPRNIEEYVH | HAGE |
| | | | [114, 133] | | | | [554, 573] |
| 3 | 344 | VKRSLVYYLKNREVRLQNET | DCAF12 | 14 | 1737 | NLLLNYGLYRKMEIYRPHKA | HDAC1 |
| | | | [42, 61] | | | | [40, 59] |
| 3 | 345 | GLTGLQSLLQGFSRLFLKGN | DKKL1 | 14 | 1738 | LNYGLYRKMEIYRPHKATAE | HDAC2 |
| | | | [44, 63] | | | | [44, 63] |
| 3 | 346 | MENRHAMSSQYRMHSYYPPP | DMRT1 | 14 | 1739 | FEYFAPDFTLHPDVSTRIEN | HDAC3 |
| | | | [278, 297] | | | | [329, 348] |
| 3 | 347 | VDDEESVILTLVPVKDDANM | DPPA2 | 14 | 1740 | PATNVSIFINNTQLSDTGTY | IGFS11 |
| | | | [18, 37] | | | | [99, 118] |
| 3 | 348 | VVAGIVVLVISRKKRMAKYE | EpCAM | 14 | 1741 | QDLLDVSFEFDVELPQLAEM | JARID1B |
| | | | [279, 298] | | | | [891, 910] |
| 3 | 349 | GIMGQFSHHNIIRLEGVISK | EPHA2 | 14 | 1742 | RVPSFAAGRVIGKGGKTVNE | KOC1 |
| | | | [665, 684] | | | | [493, 512] |
| 3 | 350 | NRVAYMNPIAMARWRGPTQS | FAM133A | 14 | 1743 | SSKRDGAIANAATVLTNMAM | KU-CT-1 |
| | | | [6, 25] | | | | [408, 427] |
| 3 | 351 | NGSVASYILASHNGISYKDL | FAM46D | 14 | 1744 | RRVHPVSTMVKGLYGIKEEL | LDHC |
| | | | [64, 83] | | | | [268, 287] |
| 3 | 352 | SAKRVWNMTATRPKKMGSQL | FATE1 | 14 | 1745 | SVKDSFRDLFIPRIETILMM | LIPI |
| | | | [63, 82] | | | | [49, 68] |
| 3 | 353 | SPQFKKTMSTFHNLVSLNLN | FBXO39 | 14 | 1746 | DLVGFLLLKYRAREPVTKAE | MAGE-A1 |
| | | | [213, 232] | | | | [108, 127] |
| 3 | 354 | RESLKMRVSKPFGMLMLSIW | FMR1NB | 14 | 1747 | LYDGMEHLIYGEPRKLLTQD | MAGE-A10 |
| | | | [58, 77] | | | | [255, 274] |
| 3 | 355 | RPGSRSSNASLEVLSTEPGS | FSIP1 | 14 | 1748 | QAQEEDLGLVGAQALQAEEQ | MAGE-A11 |
| | | | [21, 40] | | | | [127, 146] |
| 3 | 356 | DDVALENFFRYFLRLSDDKM | FTHL17 | 14 | 1749 | ELVHFLLLKYRAREPFTKAE | MAGE-A12 |
| | | | [45, 64] | | | | [115, 134] |
| 3 | 357 | RGRSTYYWPRPRRYVQPPEM | GAGE-7 | 14 | 1750 | QSPQGASSLPTTMNYPLWSQ | MAGE-A3 |
| | | | [4, 23] | | | | [63, 82] |
| 3 | 358 | DSGISVDSNFQYGWTPLMYA | GASZ | 14 | 1751 | AKELVTKAEMLERVIKNYKR | MAGE-A4 |
| | | | [67, 86] | | | | [127, 146] |
| 3 | 359 | PGLSHSYMDAAQYPLPEEVD | GATA-3 | 14 | 1752 | DPPQSPQGASSLPTTMNYPL | MAGE-A6 |
| | | | [29, 48] | | | | [60, 79] |
| 3 | 360 | EQLLQSASMELKFLIIQNAA | Glypican-3 | 14 | 1753 | QENYLEYRQAPGSDPVRYEF | MAGE-A8 |
| | | | [90, 109] | | | | [255, 274] |
| 3 | 361 | TLIGANASFSIALNFPGSQK | gp100 | 14 | 1754 | VIFGKASEFMQVIFGTDVKE | MAGE-A9 |
| | | | [76, 95] | | | | [148, 167] |
| 3 | 362 | DRQTVMTSATWPHSVHRLAQ | HAGE | 14 | 1755 | VVDEKYKDHFTEILNGASRR | MAGE-B1 |
| | | | [420, 439] | | | | [137, 156] |
| 3 | 363 | EEAFYTTDRVMTVSFHKYGE | HDAC1 | 14 | 1756 | KSGSLVQFLLYKYKIKKSVT | MAGE-B2 |
| | | | [184, 203]; | | | | [114, 133] |
| | | | HDAC2 | | | | |
| | | | [185, 204] | | | | |
| 3 | 364 | SEYFEYFAPDFTLHPDVSTR | HDAC3 | 14 | 1757 | NSNPARYEFLWGPRAHAETS | MAGE-B3 |
| | | | [326, 345] | | | | [265, 284] |
| 3 | 365 | ATQRDLIATQRDLIVTQRDL | HOM-TES-85 | 14 | 1758 | AETSKMKVLEFLAKVNDTTP | MAGE-B4 |
| | | | [261, 280] | | | | [278, 297] |
| 3 | 366 | NQPEQVILYQGGQMFDGAPR | IGFS11 | 14 | 1759 | EGILSGDNALPKSGLLMSLL | MAGE-B6 |
| | | | [68, 87] | | | | [273, 292] |
| 3 | 367 | EGEDLSKKTLLRFWLPFGFI | IL13RA2 | 14 | 1760 | SDEQGMSQNRLLILILSIIF | MAGE-C1 |
| | | | [332, 351] | | | | [989, 1008] |
| 3 | 368 | TLDDLYPMMNALKLRAESYN | JARID1B | 14 | 1761 | ASSTLYLVFSPSSFSTSSSL | MAGE-C2 |
| | | | [737, 756] | | | | [42, 61] |
| 3 | 369 | QHIKQLSRFAGASIKIAPAE | KOC1 | 14 | 1762 | KQEFLNVQEYNHLLKVMGQY | MORC1 |
| | | | [426, 445] | | | | [414, 433] |
| 3 | 370 | DPDFSMYVYEVTKSILPITN | KU-CT-1 | 14 | 1763 | EQEKEEIASKSALLRQIKEV | MPHOSPH1 |
| | | | [720, 739] | | | | [207, 226] |
| 3 | 371 | HITMPFSSPMEAELVRRILS | Lage-1 | 14 | 1764 | GSGSSTTQGQDVTLAPATEP | MUC-1 |
| | | | [91, 110] | | | | [67, 86] |
| 3 | 372 | TSGKDYSVSANSRIVIVTAG | LDHC | 14 | 1765 | LLQEANFHIIDNVDLVVSAY | NLRP4 |
| | | | [78, 97] | | | | [572, 591] |
| 3 | 373 | PSKGRRWAARAPSTRITYGT | LEMD1 | 14 | 1766 | SPGSTLSSSRSVELNGFMAF | NR6A1 |
| | | | [111, 130] | | | | [191, 210] |
| 3 | 374 | PDKTMMDGSFSFKLLNQLGM | LIPI | 14 | 1767 | NNKLYQLDGLSDITEKAPKV | NXF2 |
| | | | [367, 386] | | | | [279, 298] |
| 3 | 375 | RALAETSYVKVLEYVIKVSA | MAGE-A1 | 14 | 1768 | IPESIYQKVMEINREVEEPP | NY-BR-1 |
| | | | [269, 288] | | | | [442, 461] |
| 3 | 376 | DEKVTDLVQFLLFKYQMKEP | MAGE-A10 | 14 | 1769 | GRGILIFSDFKDFIFDDMYI | NYD-TSPG |
| | | | [135, 154] | | | | [219, 238] |
| 3 | 377 | DKIIDLVHLLLRKYRVKGLI | MAGE-A11 | 14 | 1770 | KSQVMKTRLEADEVAAQLER | ODF2 |
| | | | [224, 243] | | | | [547, 566] |
| 3 | 378 | PDLETSFQVALSRKMAELVH | MAGE-A12 | 14 | 1771 | QPDQMRSAEQTRLMPAEQRD | PASD1 |
| | | | [99, 118] | | | | [749, 768] |
| 3 | 379 | PQGASSFSTTINYTLWRQSD | MAGE-A2 | 14 | 1772 | KRSPRGLSHSPWAVKKINPI | PBK |
| | | | [65, 84] | | | | [50, 69] |
| 3 | 380 | LSRKVAELVHFLLLKYRARE | MAGE-A3 | 14 | 1773 | GSILLPSFQIALLTSEDHIN | PEPP2 |
| | | | [109, 128] | | | | [212, 231] |
| 3 | 381 | TTEEQEAAVSSSSPLVPGTL | MAGE-A4 | 14 | 1774 | GSSGIIVRLSTNHFRLTSRP | PIWIL1 |
| | | | [32, 51] | | | | [106, 125] |
| 3 | 382 | TTEEQEAVSSSSPLVPGTLG | MAGE-A5 | 14 | 1775 | KEITFLEYYSKNYGITVKEE | PIWIL2 |
| | | | [32, 51] | | | | [448, 467] |
| 3 | 383 | QAALSRKVAKLVHFLLLKYR | MAGE-A6 | 14 | 1776 | GTSLEIWLGYVTSVLQYENS | PIWIL3 |
| | | | [106, 125] | | | | [258, 277] |
| 3 | 384 | EALDEKVAELVRFLLRKYQI | MAGE-A8 | 14 | 1777 | VDSEATRNEWYDFYLISQVA | PIWIL4 |
| | | | [110, 129] | | | | [756, 775] |
| 3 | 385 | VIKNYKRYFPVIFGKASEFM | MAGE-A9 | 14 | 1778 | DSLFFLRGRLDQLLRHVMNP | PRAME |
| | | | [138, 157] | | | | [304, 323] |
| 3 | 386 | NSDPPRYQFLWGPRAYAETT | MAGE-B1 | 14 | 1779 | ENIKKFLYNFTQIPHLAGTE | PSMA |
| | | | [262, 281] | | | | [68, 87] |
| 3 | 387 | FPEILKKASEGLSVVFGLEL | MAGE-B2 | 14 | 1780 | IRGRRYPLSEKKIMHYMYQL | RAGE-1 |
| | | | [149, 168] | | | | [93, 112] |
| 3 | 388 | YDGKKHFIFGEPRKLITQDL | MAGE-B3 | 14 | 1781 | GSMKVKRQFVEFTIKEAARF | SAGE1 |
| | | | [233, 252] | | | | [854, 873] |
| 3 | 389 | NSDPPRYQFLWGPRAHAETS | MAGE-B4 | 14 | 1782 | PYEEALLQAEAPRLAEYQAY | SART3 |
| | | | [262, 281] | | | | [297, 316] |
| 3 | 390 | GLYPHLYEDALIDEVERALR | MAGE-B6 | 14 | 1783 | EETRQVYMDLNNNIEKMITA | SCP-1 |
| | | | [385, 404] | | | | [205, 224] |
| 3 | 391 | EVDPDDSYVFVNTLDLTSEG | MAGE-C1 | 14 | 1784 | IEKRRKKASSAGVVEDMGGE | SCP3a |
| | | | [967, 986] | | | | [50, 69] |
| 3 | 392 | GREHFVYGEPRELLTKVWVQ | MAGE-C2 | 14 | 1785 | SQLSLTTKMDAEHPELRSYA | SCRN1 |
| | | | [261, 280] | | | | [189, 208] |
| 3 | 393 | EDFPARWSFRAYTSVLYFNP | MORC1 | 14 | 1786 | QDKRIENLREKVNILEAQNK | se57-1 |
| | | | [229, 248] | | | | [274, 293] |
| 3 | 394 | ADIKKQAEIAHLYIASLPDP | MPHOSPH1 | 14 | 1787 | TTIAFFIYKRRLNENTDFPD | SLCO6A1 |
| | | | [687, 706] | | | | [684, 703] |
| 3 | 395 | STEKNAVSMTSSVLSSHSPG | MUC-1 | 14 | 1788 | QQQEQIARQQQQLLQQQHKI | SOX-6 |
| | | | [48, 67] | | | | [232, 251] |
| 3 | 396 | IWFQNRRYKTKRKQLSSELG | NKX3.1 | 14 | 1789 | LADGNVKAFYRRALAHKGLK | SPAG1 |
| | | | [170, 189] | | | | [686, 705] |
| 3 | 397 | QPERLLFVIDSFEELQGGLN | NLRP4 | 14 | 1790 | EKKRSSIWQFFSRLFSSSSN | SPAG9 |
| | | | [222, 241] | | | | [546, 565] |
| 3 | 398 | MKAINFLNQDIRGLTSASQL | NR6A1 | 14 | 1791 | SLILKILSMIYKLVQSNTYA | SPO11 |
| | | | [392, 411] | | | | [112, 131] |
| 3 | 399 | ASPQETQSAFSIPVSTLSSS | NXF2 | 14 | 1792 | PDVENEVKALLRSDAEAVST | TAF7L |
| | | | [544, 563] | | | | [259, 278] |
| 3 | 400 | HHIHEQIMEYIRKLSKNHQN | NY-BR-1 | 14 | 1793 | NESVRPYTPFEVKIRSYNRR | TAG-1 |
| | | | [195, 214] | | | | [775, 794] |
| 3 | 401 | SRHTPHKTLMPYASLFQSHS | NYD-TSPG | 14 | 1794 | LMELNGSSSQLIIMLLKNFM | TDRD1 |
| | | | [513, 532] | | | | [1060, 1079] |
| 3 | 402 | EAELARRSLAQDAPPLPVPG | NY-ESO-1 | 14 | 1795 | DIPQLKLVNEVFTIDDTLQT | TEKT5 |
| | | | [101, 120] | | | | [409, 428] |
| 3 | 403 | STNRSMQNYVQFLKSSYANV | ODF2 | 14 | 1796 | AEQEHSSKLRHPYLLQLMAV | TEX14 |
| | | | [788, 807] | | | | [294, 313] |
| 3 | 404 | SAPSHSISARTKAFRVDSTP | ODF3 | 14 | 1797 | LRSLLWYDETLYAELLGKPR | TEX15 |
| | | | [118, 137] | | | | [1716, 1735] |
| 3 | 405 | RWPVDVSNRIHTSAHVMSMG | ODF4 | 14 | 1798 | HVSDHNRLLHLARPKAQSDK | THEG |
| | | | [115, 134] | | | | [293, 312] |
| 3 | 406 | SRVTNNVVLEAPFLVGIEGS | OIP5 | 14 | 1799 | TTDKILIDVFDGLPLYDDVK | TPTE |
| | | | [107, 126] | | | | [458, 477] |
| 3 | 407 | QAVPAFQGPDMEAFQQELAL | PAGE2 | 14 | 1800 | TVEKEMKSLARKAMDTESEL | TSGA10 |
| | | | [58, 77] | | | | [174, 193] |
| 3 | 408 | EPAAAAAAAAISDDQIDIAE | PASD1 | 14 | 1801 | QMTQTASDVPVLQVIMHSRY | TSP50 |
| | | | [227, 246] | | | | [173, 192] |
| 3 | 409 | EDPKDRPSAAHIVEALETDV | PBK | 14 | 1802 | TPIEWYPDYEVEAYRRRHHN | TSPY1 |
| | | | [303, 322] | | | | [233, 252] |
| 3 | 410 | PTPESSTIASYVTLRKTKKM | PEPP2 | 14 | 1803 | SQVQGSANDPIFLLHHAFVD | TYR |
| | | | [856, 875] | | | | [375, 394] |
| 3 | 411 | QWALYQYHIDYNPLMEARRL | PIWIL1 | 14 | 1804 | LESQPAIRNQGYSTVTFDGT | WT1 |
| | | | [126, 145] | | | | [138, 157] |
| 3 | 412 | FYNVVFARVMKLLDMKLVGR | PIWIL2 | 14 | 1805 | LKPEIHTKEQILELLVLEQF | ZNF165 |
| | | | [322, 341] | | | | [78, 97] |
| 3 | 413 | HYAHKLAYLVGQSIHQEPNR | PIWIL3 | 15 | 1806 | ASNHFLYLPRDVLAQLPSLR | 5T4 |
| | | | [854, 873] | | | | [218, 237] |
| 3 | 414 | FERKLLFSADVSYKVLRNET | PIWIL4 | 15 | 1807 | ALSPGKSEDVVLRWSQEFST | ACRBP |
| | | | [253, 272] | | | | [517, 536] |
| 3 | 415 | QEAQPLQPSHFLDISEDWSL | PLAC1 | 15 | 1808 | QNLGEALDFRERQQSALDES | ACTL8 |
| | | | [184, 203] | | | | [216, 235] |
| 3 | 416 | NLRALLLSHIHASSYISPEK | PRAME | 15 | 1809 | NFDSLPVQITVPEKIRSIIK | ADAM2 |
| | | | [261, 280] | | | | [19, 38] |
| 3 | 417 | KNSVKTDLMKAPMVIMDWEE | PRSS55 | 15 | 1810 | FRIVEIVVVIDNYLYIRYER | ADAM29 |
| | | | [202, 221] | | | | [197, 216] |
| 3 | 418 | TPLMYSLVHNLTKELKSPDE | PSMA | 15 | 1811 | KWVESIFLIFLLNFTESRTL | AFP |
| | | | [467, 486] | | | | [2, 21] |
| 3 | 419 | EIQALRRLNPHPNILMLHEV | RAGE-1 | 15 | 1812 | LGNGSSVDEVSFYANALTNL | AKAP-3 |
| | | | [50, 69] | | | | [115, 134] |
| 3 | 420 | MTPTIRKTQKIVIKKREPLN | RCAS1 | 15 | 1813 | YSVYADQVNIDYLMNRPQNL | AKAP-4 |
| | | | [98, 117] | | | | [156, 175] |
| 3 | 421 | NGQAASDNVFSTVPPAFINM | SAGE1 | 15 | 1814 | LEKDIISDTSGDFRKLMVAL | ANXA2 |
| | | | [589, 608] | | | | [155, 174] |
| 3 | 422 | KNPDFKVFRYSTSLEKHKLF | SART3 | 15 | 1815 | GDKLGRVVHIIQSREPSLSN | BRDT |
| | | | [785, 804] | | | | [527, 546] |
| 3 | 423 | ASLEIELSNLKAELLSVKKQ | SCP-1 | 15 | 1816 | KVSSIHSDQSDVLMVDVATS | CABYR |
| | | | [747, 766] | | | | [182, 201] |
| 3 | 424 | AKRKRLEMYTKASLKTSNQK | SCP3a | 15 | 1817 | GAKLDKYHSLNEELDFLVTS | CAGE1 |
| | | | [87, 106] | | | | [688, 707] |
| 3 | 425 | RSIFKPFIFVDDVKLVPKTQ | SCRN1 | 15 | 1818 | KVHVILHFKNKYHENKKLIR | CALR3 |
| | | | [302, 321] | | | | [143, 162] |
| 3 | 426 | MEDNSALYESTSAHIIEETE | se57-1 | 15 | 1819 | ARNETLSNTLVELSAQVGQL | CCDC62 |
| | | | [16, 35] | | | | [133, 152] |
| 3 | 427 | RVVPDKLRSLALGVSYVILR | SLCO6A1 | 15 | 1820 | SQEIFLNLKTALEKYHDGIE | CDCA1 |
| | | | [605, 624] | | | | [419, 438] |
| 3 | 428 | GSSLDILSSLNSPALFGDQD | SOX-6 | 15 | 1821 | NVGEVSTPFHIFKVKVTTER | CT46 |
| | | | [475, 494] | | | | [211, 230] |
| 3 | 429 | SSEEDKEKEEVAAVKIQAAF | SP17 | 15 | 1822 | ATEELETYRKRAKDLKEFEK | CTAGE2 |
| | | | [106, 125] | | | | [394, 413] |
| 3 | 430 | NRALELHPFSMKPLLRRAMA | SPAG1 | 15 | 1823 | ELYQENEMKLHRKLTVEENY | cTAGE5 |
| | | | [511, 530] | | | | [387, 406] |
| 3 | 431 | EDGRVQAFGWSLPQKYKQVT | SPAG9 | 15 | 1824 | AFQDSVLEEEVELVLAPSEE | CTCFL |
| | | | [639, 658] | | | | [55, 74] |
| 3 | 432 | ESSTILVVRYRRNVKRTSPE | SPAN-Xc | 15 | 1825 | TVMPRFAEQVEVAIEALSAN | CTNNA2 |
| | | | [46, 65] | | | | [580, 599] |
| 3 | 433 | EQVRRSISRLTDVSAQDFSM | SPATA19 | 15 | 1826 | HLGTLNKVFASQWLNHRQVV | DCAF12 |
| | | | [141, 160] | | | | [85, 104] |
| 3 | 434 | QGIRNLVTDAKFVLIVEKDA | SPO11 | 15 | 1827 | KEALVPIQKATDSFHTELHP | DKKL1 |
| | | | [208, 227] | | | | [146, 165] |
| 3 | 435 | WKKMKYSEKISYVYMKRNYK | SSX-1 | 15 | 1828 | ASGALVGAASGSSAGGSSRG | DMRT1 |
| | | | [37, 56] | | | | [34, 53] |
| 3 | 436 | EKIFYVYMKRKYEAMTKLGF | SSX-2 | 15 | 1829 | GDQDNWLRTNWVYRGEAERI | EPHA2 |
| | | | [44, 63] | | | | [75, 94] |
| 3 | 437 | EWEKMKVSEKIVYVYMKRKY | SSX-3 | 15 | 1830 | ASHNGISYKDLDVIFGVELP | FAM46D |
| | | | [36, 55] | | | | [73, 92] |
| 3 | 438 | EWEKMKSSEKIVYVYMKLNY | SSX-4 | 15 | 1831 | ERLARILLQEIPIRSISLRS | FBXO39 |
| | | | [36, 55] | | | | [296, 315] |
| 3 | 439 | EWEKMKASEKIIYVYMKRKY | SSX-5 | 15 | 1832 | QGLEMRIKLWEEIKSAKYSE | FSIP1 |
| | | | [36, 55] | | | | [142, 161] |
| 3 | 440 | TLPPAWQPFLKDHRISTFKN | Survivin | 15 | 1833 | YAASVANAELVRVLLDRGAN | GASZ |
| | | | [5, 24] | | | | [85, 104] |
| 3 | 441 | KNKQRQLRLAFEEQLEDLMG | SYCE1 | 15 | 1834 | PLPDSMKLESSHSRGSMTAL | GATA-3 |
| | | | [148, 167] | | | | [189, 208] |
| 3 | 442 | QRQKDLIMKVENLTLKNHFQ | TAF7L | 15 | 1835 | IQNAAVFQEAFEIVVRHAKN | Glypican-3 |
| | | | [413, 432] | | | | [105, 124] |
| 3 | 443 | DFSTKSVFSKFAQLNLAAED | TAG-1 | 15 | 1836 | AFTITDQVPFSVSVSQLRAL | gp100 |
| | | | [214, 233] | | | | [206, 225] |
| 3 | 444 | GGAESERGLPASTLSRLSNR | TAG-2a | 15 | 1837 | FVNLKNITYLVLDEADKMLD | HAGE |
| | | | [29, 48] | | | | [384, 403] |
| 3 | 445 | GDFYVQLYSSEVLEYMNQLS | TDRD1 | 15 | 1838 | RPDNMSEYSKQMQRFNVGED | HDAC1 |
| | | | [277, 296] | | | | [80, 99]; |
| | | | | | | | HDAC2 |
| | | | | | | | [81, 100] |
| 3 | 446 | DQMWRQFTDTNLAFNARISE | TEKT5 | 15 | 1839 | PTATQDQVQGTVTIRNISAL | IGFS11 |
| | | | [329, 348] | | | | [189, 208] |
| 3 | 447 | MTVEADPANMFNWTTEEVET | TEX101 | 15 | 1840 | PYKYKLRYRYTLDDLYPMMN | JARID1B |
| | | | [34, 53] | | | | [727, 746] |
| 3 | 448 | QMAYLGSLPVIGEKEVIQAD | TEX14 | 15 | 1841 | DQTPDENDQVVVKITGHFYA | KOC1 |
| | | | [226, 245] | | | | [526, 545] |
| 3 | 449 | LKKSKYFISTYIDFVPYIAS | TEX15 | 15 | 1842 | FHPGGLMKLRSREADLYRFI | KU-CT-1 |
| | | | [2172, 2191] | | | | [853, 872] |
| 3 | 450 | TERFLEDTTLTITVPAVSRR | THEG | 15 | 1843 | KDYSVSANSRIVIVTAGARQ | LDHC |
| | | | [174, 193] | | | | [81, 100] |
| 3 | 451 | LYDDVKVQFFYSNLPTYYDN | TPTE | 15 | 1844 | NDFVNISSIGLTYFQSSNLQ | LIPI |
| | | | [472, 491] | | | | [413, 432] |
| 3 | 452 | DQVDWSRLLRDAGLVKMSRK | TRAG-3 | 15 | 1845 | GREHSAYGEPRKLLTQDLVQ | MAGE-A1 |
| | | | [52, 71] | | | | [226, 245] |
| 3 | 453 | MANERISMQNLEALLVANRD | TSGA10 | 15 | 1846 | LLTQDWVQENYLEYRQVPGS | MAGE-A10 |
| | | | [557, 576] | | | | [270, 289]; |
| | | | | | | | MAGE-A9 |
| | | | | | | | [244, 263] |
| 3 | 454 | DNFYHNFTKIPTLVQIIKSQ | TSP50 | 15 | 1847 | VGAQALQAEEQEAAFFSSTL | MAGE-A11 |
| | | | [274, 293] | | | | [136, 155] |
| 3 | 455 | LVNITEYRASHSTPIEWYPD | TSPY1 | 15 | 1848 | SPQGASTLPTTINYTLWSQS | MAGE-A12 |
| | | | [221, 240] | | | | [64, 83] |
| 3 | 456 | ADASQSSMHNALHIYMNGTM | TYR | 15 | 1849 | REPVTKAEMLGSVVGNWQYF | MAGE-A3 |
| | | | [355, 374] | | | | [127, 146]; |
| | | | | | | | MAGE-A6 |
| | | | | | | | [127, 146] |
| 3 | 457 | AVRRGRRGKKGAATKMAAVT | VCX | 15 | 1850 | WVQENYLEYRQVPGSNPARY | MAGE-A4 |
| | | | [44, 63] | | | | [251, 270] |
| 3 | 458 | TWNQMNLGATLKGVAAGSSS | WT1 | 15 | 1851 | DSIFGDPKKLLTQYFVQENY | MAGE-A6 |
| | | | [237, 256] | | | | [236, 255] |
| 3 | 459 | QTPGINLDLGSGVKVKIIPK | XAGE-1 | 15 | 1852 | QIKEPVTKAEMLESVIKNYK | MAGE-A8 |
| | | | [46, 65]; | | | | [128, 147] |
| | | | XAGE-1c | | | | |
| | | | [125, 144]; | | | | |
| | | | XAGE-1b | | | | |
| | | | [46, 65] | | | | |
| 3 | 460 | QLKVGILHLGSRQKKIRIQL | XAGE-1d | 15 | 1853 | DGEEHLIYGEPRKFITQDLV | MAGE-B1 |
| | | | [10, 29] | | | | [231, 250] |
| 3 | 461 | TPDQKREDDQGAAEIQVPDL | XAGE-2 | 15 | 1854 | VNPNGHTYTFIDKVDLTDEE | MAGE-B2 |
| | | | [47, 66] | | | | [171, 190] |
| 3 | 462 | KEQILELLVLEQFLTILPGD | ZNF165 | 15 | 1855 | KMKKPIMKADMLKIVQKSHK | MAGE-B3 |
| | | | [85, 104] | | | | [127, 146] |
| 4 | 463 | NSLVSLTYVSFRNLTHLESL | 5T4 | 15 | 1856 | LKIISKKYKEHFPEIFRKVS | MAGE-B4 |
| | | | [244, 263] | | | | [136, 155] |
| 4 | 464 | EDVVLRWSQEFSTLTLGQFG | ACRBP | 15 | 1857 | GSPDAVVSYSKSDVAANGQD | MAGE-B6 |
| | | | [524, 543] | | | | [71, 90] |
| 4 | 465 | KTLEFAGQDLSAYLLKSLFK | ACTL8 | 15 | 1858 | LQIPVSRSFSSTLLSIFQSS | MAGE-C1 |
| | | | [171, 190] | | | | [198, 217] |
| 4 | 466 | RTISLESLAVILAQLLSLSM | ADAM2 | 15 | 1859 | YTLDEKVAELVEFLLLKYEA | MAGE-C2 |
| | | | [300, 319] | | | | [139, 158] |
| 4 | 467 | SENITPRMQHDTSHLFTTLG | ADAM29 | 15 | 1860 | LYRPRKYLYVTSSFKGAFKD | MORC1 |
| | | | [274, 293] | | | | [268, 287] |
| 4 | 468 | NFGTRTFQAITVTKLSQKFT | AFP | 15 | 1861 | RKKWLEEKMMLITQAKEAEN | MPHOSPH1 |
| | | | [229, 248] | | | | [1459, 1478] |
| 4 | 469 | DLRSVFFNFIRNLLSETIFK | AKAP-3 | 15 | 1862 | STLVHNGTSARATTTPASKS | MUC-1 |
| | | | [589, 608] | | | | [970, 989] |
| 4 | 470 | SDLQKYALGFQHALSPSTST | AKAP-4 | 15 | 1863 | QELLVANFEKARRAHWIFLG | NLRP4 |
| | | | [116, 135] | | | | [481, 500] |
| 4 | 471 | QNKPLYFADRLYDSMKGKGT | ANXA2 | 15 | 1864 | QDFTEYKYTHQPNRFPDLMM | NR6A1 |
| | | | [264, 283] | | | | [423, 442] |
| 4 | 472 | SEILKEMLAKKHFSYAWPFY | BRDT | 15 | 1865 | KLESAWELGKVKGLKLEELW | NXF2 |
| | | | [277, 296] | | | | [307, 326] |
| 4 | 473 | AYFQELTMYRGNTTMDIKDL | CABYR | 15 | 1866 | LQRKMNVDVSSTIYNNEVLH | NY-BR-1 |
| | | | [39, 58] | | | | [1175, 1194] |
| 4 | 474 | KITKQQVFIDVINKLKENVE | CAGE1 | 15 | 1867 | TIYVYQEGLVRFATEKFDLS | NYD-TSPG |
| | | | [343, 362] | | | | [269, 288] |
| 4 | 475 | RVALATVYFQEEFLDGEHWR | CALR3 | 15 | 1868 | DSLVERLHRQTAEYSAFKLE | ODF2 |
| | | | [15, 34] | | | | [488, 507] |
| 4 | 476 | HPSNFIIEAPGHMSDVEWMS | CCDC62 | 15 | 1869 | LETPQDYIRLWQELSDSLGP | PASD1 |
| | | | [517, 536] | | | | [683, 702] |
| 4 | 477 | QEKRGAVYERVTTINQEIQK | CDCA1 | 15 | 1870 | EAVEENGVITDKADIFAFGL | PBK |
| | | | [381, 400] | | | | [216, 235] |
| 4 | 478 | NKHNELRKAVSPPASNMLKM | CRISP2 | 15 | 1871 | QTESAGIQRAQIQKELWRIQ | PEPP2 |
| | | | [42, 61] | | | | [747, 766] |
| 4 | 479 | AGDSLIAGSAMSKAKKLMTG | CT45 | 15 | 1872 | LSTNHFRLTSRPQWALYQYH | PIWIL1 |
| | | | [42, 61] | | | | [114, 133] |
| 4 | 480 | VGEVSTPFHIFKVKVTTERE | CT46 | 15 | 1873 | KSMRFGMLKDHQAVTGNVTA | PIWIL2 |
| | | | [212, 231] | | | | [254, 273] |
| 4 | 481 | ENRQLSRLMVGPHAAARNLW | CT47 | 15 | 1874 | LKFDTNFLSVPGRVLKNANI | PIWIL3 |
| | | | [143, 162] | | | | [458, 477] |
| 4 | 482 | LTERLLKMKDGVAMLEEDVT | CTAGE2 | 15 | 1875 | WGLHFGSQISLTGRIVPSEK | PIWIL4 |
| | | | [237, 256] | | | | [434, 453] |
| 4 | 483 | PSSETRAFLSPPTLLEGPLR | cTAGE5 | 15 | 1876 | PSVSQLSVLSLSGVMLTDVS | PRAME |
| | | | [527, 546] | | | | [346, 365] |
| 4 | 484 | KSDLRVHMRNLHAYSAAELK | CTCFL | 15 | 1877 | SVYETYELVEKFYDPMFKYH | PSMA |
| | | | [440, 459] | | | | [554, 573] |
| 4 | 485 | ISDSFLETNVPLLVLIEAAK | CTNNA2 | 15 | 1878 | RLNPHPNILMLHEVVFDRKS | RAGE-1 |
| | | | [388, 407] | | | | [56, 75] |
| 4 | 486 | RLLRLALAFYGRTADPAERQ | CXorf48 | 15 | 1879 | TIKEAARFKKVVLIQQLEKA | SAGE1 |
| | | | [3, 22] | | | | [866, 885] |
| 4 | 487 | PHSIARQKRILVNLSMVENK | CXorf61 | 15 | 1880 | ELTKVRMARQKMSEIFPLTE | SART3 |
| | | | [71, 90] | | | | [127, 146] |
| 4 | 488 | PARSQADKPVLAIQVLGTVK | DBPC | 15 | 1881 | EELKGTEQELIGLLQAREKE | SCP-1 |
| | | | [80, 99] | | | | [458, 477] |
| 4 | 489 | GSEWSVYAVGSQAHVSFLDP | DCAF12 | 15 | 1882 | EGVGVDINKALLAKRKRLEM | SCP3a |
| | | | [305, 324] | | | | [75, 94] |
| 4 | 490 | SRLSPRKTHLLYILRPSRQL | DKKL1 | 15 | 1883 | QEESITVQTMMNTLRDKASG | SCRN1 |
| | | | [223, 242] | | | | [245, 264] |
| 4 | 491 | SSQDSGLVSLSSSSPISNKS | DMRT1 | 15 | 1884 | IPPRDKMEDNSALYESTSAH | se57-1 |
| | | | [328, 347] | | | | [10, 29] |
| 4 | 492 | ERAEETNTVEVITSAPGAML | DPPA2 | 15 | 1885 | LKTIEKLALEKSYDISSGLV | SLCO6A1 |
| | | | [167, 186] | | | | [139, 158] |
| 4 | 493 | QKEITTRYQLDPKFITSILY | EpCAM | 15 | 1886 | TSPTQNLFPASKTSPVNLPN | SOX-6 |
| | | | [167, 186] | | | | [441, 460] |
| 4 | 494 | PGHQKRIAYSLLGLKDQVNT | EPHA2 | 15 | 1887 | PGNVKALLRRATTYKHQNKL | SPAG1 |
| | | | [952, 971] | | | | [273, 292] |
| 4 | 495 | RGPTQSVGPTIQDYLNRPRP | FAM133A | 15 | 1888 | SIKLKDSILSIVHVKGIVLV | SPAG9 |
| | | | [20, 39] | | | | [996, 1015] |
| 4 | 496 | LDPMLDFYSDKNAKLTKESY | FAM46D | 15 | 1889 | LASSSEVLASIENIIQDIIT | SPO11 |
| | | | [180, 199] | | | | [41, 60] |
| 4 | 497 | EEQGATWRHRETLIIAVLVS | FATE1 | 15 | 1890 | QGHTSSEYDMLREMFSDSRS | TAF7L |
| | | | [152, 171] | | | | [311, 330] |
| 4 | 498 | WRNSIRSSFISSLSFFLKKM | FBXO39 | 15 | 1891 | LWSKGTEILVNSSRVTVTPD | TAG-1 |
| | | | [141, 160] | | | | [451, 470] |
| 4 | 499 | RRSHRAMRVAHLELATYELA | FMR1NB | 15 | 1892 | IKIVDILEEEVVTFAVEVEL | TDRD1 |
| | | | [13, 32] | | | | [410, 429] |
| 4 | 500 | EEEDTFSSVFHTQIPPEEYE | FSIP1 | 15 | 1893 | DESTSTLAPPTILPTLRSAL | TEKT5 |
| | | | [191, 210] | | | | [66, 85] |
| 4 | 501 | LSMAFYFNRDDVALENFFRY | FTHL17 | 15 | 1894 | GEYFYSSTAQENLALETSSP | TEX14 |
| | | | [36, 55] | | | | [1088, 1107] |
| 4 | 502 | WPRPRRYVQPPEMIGPMRPE | GAGE-7 | 15 | 1895 | LDKQRILTVDSFAASSTVPH | TEX15 |
| | | | [11, 30] | | | | [1354, 1373] |
| 4 | 503 | LKERDITLRHLLTMREDEFT | GASZ | 15 | 1896 | EDTTLTITVPAVSRRVEELS | THEG |
| | | | [295, 314] | | | | [179, 198] |
| 4 | 504 | FPKNSSFNPAALSRHMSSLS | GATA-3 | 15 | 1897 | AYDPKHFHNRVVRIMIDDHN | TPTE |
| | | | [386, 405] | | | | [289, 308] |
| 4 | 505 | SMELKFLIIQNAAVFQEAFE | Glypican-3 | 15 | 1898 | SRDVAQFRNVVTQLEADLDI | TSGA10 |
| | | | [97, 116] | | | | [610, 629] |
| 4 | 506 | AHSSSAFTITDQVPFSVSVS | gp100 | 15 | 1899 | TTQTLPSTTMETQFPVSEGK | TSP50 |
| | | | [201, 220] | | | | [78, 97] |
| 4 | 507 | EEEKWSHMQTFLQSMSSTDK | HAGE | 15 | 1900 | LVERREEAQRAQQAVPGPGP | TSPY1 |
| | | | [470, 489] | | | | [83, 102] |
| 4 | 508 | EKIKQRLFENLRMLPHAPGV | HDAC1 | 15 | 1901 | KNGSTPMFNDINIYDLFVWM | TYR |
| | | | [360, 379]; | | | | [160, 179] |
| | | | HDAC2 | | | | |
| | | | [361, 380] | | | | |
| 4 | 509 | WTYETSLLVEEAISEELPYS | HDAC3 | 15 | 1902 | QRKFSRSDHLKTHTRTHTGK | WT1 |
| | | | [307, 326] | | | | [389, 408] |
| 4 | 510 | PNHPSRKKVNFLDMSLDDII | HOM-TES-85 | 15 | 1903 | ENSRSMPKLEIFEKIESQRI | ZNF165 |
| | | | [15, 34] | | | | [188, 207] |
| 4 | 511 | SSDNNTLTSSNAYNSRYWSN | IGFS11 | 16 | 1904 | HLPSLRQLDLSHNPLADLSP | 5T4 |
| | | | [305, 324] | | | | [140, 159] |
| 4 | 512 | GSETWKTIITKNLHYKDGFD | IL13RA2 | 16 | 1905 | KEGREAVSQLQTDSEPKFHS | ACRBP |
| | | | [77, 96] | | | | [239, 258] |
| 4 | 513 | PYSAVEKAMARLQELLTVSE | JARID1B | 16 | 1906 | TLEFAGQDLSAYLLKSLFKE | ACTL8 |
| | | | [950, 969] | | | | [172, 191] |
| 4 | 514 | EAQDIKFTEEIPLKILAHNN | KOC1 | 16 | 1907 | QLYNHMGSDTTVVAQKVFQL | ADAM2 |
| | | | [267, 286] | | | | [189, 208] |
| 4 | 515 | LLRELDVMNSVIAQLAPEEE | KU-CT-1 | 16 | 1908 | VFTYTDQGAILEDQPFVQNN | ADAM29 |
| | | | [103, 122] | | | | [80, 99] |
| 4 | 516 | AELVRRILSRDAAPLPRPGA | Lage-1 | 16 | 1909 | EYSRRHPQLAVSVILRVAKG | AFP |
| | | | [102, 121] | | | | [357, 376] |
| 4 | 517 | NLDSARFRYLIGEKLGVHPT | LDHC | 16 | 1910 | MDTSTDPVRVLSWLRRDLEK | AKAP-3 |
| | | | [164, 183] | | | | [32, 51] |
| 4 | 518 | LQGNIILSTEKSKKLKKWPE | LEMD1 | 16 | 1911 | SKIASEMAYEAVELTAAEMR | AKAP-4 |
| | | | [74, 93] | | | | [268, 287] |
| 4 | 519 | GSIPLWLQNFVRILLNEEDM | LIPI | 16 | 1912 | ETVILGLLKTPAQYDASELK | ANXA2 |
| | | | [108, 127] | | | | [96, 115] |
| 4 | 520 | FPEIFGKASESLQLVFGIDV | MAGE-A1 | 16 | 1913 | DKSKLWLLKDRDLARQKEQE | BRDT |
| | | | [140, 159] | | | | [900, 919] |
| 4 | 521 | DGMEHLIYGEPRKLLTQDWV | MAGE-A10 | 16 | 1914 | PGTEQTEAVGGLSSKPATPK | CABYR |
| | | | [257, 276] | | | | [129, 148] |
| 4 | 522 | EEQEAAFFSSTLNVGTLEEL | MAGE-A11 | 16 | 1915 | PVQEDMALNEVLQKLKHTNR | CAGE1 |
| | | | [144, 163] | | | | [298, 317] |
| 4 | 523 | QDFFPVIFSKASEYLQLVFG | MAGE-A12 | 16 | 1916 | HKEKDKGLQTTQNGRFYAIS | CALR3 |
| | | | [144, 163]; | | | | [59, 78] |
| | | | MAGE-A2 | | | | |
| | | | [144, 163] | | | | |
| 4 | 524 | PDLESEFQAALSRKVAELVH | MAGE-A3 | 16 | 1917 | PTLSDEKQWHDVSVYLGLTN | CCDC62 |
| | | | [99, 118] | | | | [453, 472] |
| 4 | 525 | NKVDELAHFLLRKYRAKELV | MAGE-A4 | 16 | 1918 | DLSDNREKLASILKESLNLE | CDCA1 |
| | | | [112, 131] | | | | [302, 321] |
| 4 | 526 | AIPTAIDFTLWRQSIKGSSN | MAGE-A5 | 16 | 1919 | ESSMLSTDTKKASILLIRKI | CT46 |
| | | | [70, 89] | | | | [138, 157] |
| 4 | 527 | PDLESEFQAALSRKVAKLVH | MAGE-A6 | 16 | 1920 | TEIEFKIKLLEKDPYGLDVP | CTAGE2 |
| | | | [99, 118] | | | | [458, 477] |
| 4 | 528 | EEQKAASSSSTLIMGTLEEV | MAGE-A8 | 16 | 1921 | IEEKSKLLEKFSLVQKEYEG | cTAGE5 |
| | | | [34, 53] | | | | [86, 105] |
| 4 | 529 | QGGASSSISVYYTLWSQFDE | MAGE-A9 | 16 | 1922 | TSGELVRHRRYKHTHEKPFK | CTCFL |
| | | | [62, 81] | | | | [324, 343] |
| 4 | 530 | RTTATTFRARSRAPFSRSSH | MAGE-B1 | 16 | 1923 | KKTRDLRRQLRKAVMDHISD | CTNNA2 |
| | | | [326, 345] | | | | [371, 390] |
| 4 | 531 | PLTRKSGSLVQFLLYKYKIK | MAGE-B2 | 16 | 1924 | PSLLKEREFHLGTLNKVFAS | DCAF12 |
| | | | [110, 129] | | | | [76, 95] |
| 4 | 532 | EERVQAAAMLNDGSSAMGRK | MAGE-B3 | 16 | 1925 | EHQLGNNTLSSHLQIDKMTD | DKKL1 |
| | | | [315, 334] | | | | [92, 111] |
| 4 | 533 | RVAARRGTTAMTSAYSRATS | MAGE-B4 | 16 | 1926 | GSSRGGGSGSGASDLGAGSK | DMRT1 |
| | | | [320, 339] | | | | [49, 68] |
| 4 | 534 | VRREYKPYFPQILNRTSQHL | MAGE-B6 | 16 | 1927 | LEGRSTTSLSVSWSIPPPQQ | EPHA2 |
| | | | [225, 244] | | | | [444, 463] |
| 4 | 535 | ISRYTGYFPVIFRKAREFIE | MAGE-C1 | 16 | 1928 | PTMEVKPKDIIHVVKDQLIG | FAM46D |
| | | | [939, 958] | | | | [34, 53] |
| 4 | 536 | VFSPSSFSTSSSLILGGPEE | MAGE-C2 | 16 | 1929 | RPSRVHASEVESAVWYVKKF | FBXO39 |
| | | | [49, 68] | | | | [66, 85] |
| 4 | 537 | TSVLYFNPWMRIFIQAKRVK | MORC1 | 16 | 1930 | FIKRNIELAKESRNPVVMVD | FSIP1 |
| | | | [241, 260] | | | | [254, 273] |
| 4 | 538 | KFSVWVSFFEIYNEYIYDLF | MPHOSPH1 | 16 | 1931 | TQVVALLVAHGAEVNTQDEN | GASZ |
| | | | [268, 287] | | | | [162, 181] |
| 4 | 539 | NGGSSLSYTNPAVAAASANL | MUC-1 | 16 | 1932 | KDNEISTFHNLGNVHSPLKL | Glypican-3 |
| | | | [1236, 1255] | | | | [545, 564] |
| 4 | 540 | ELERKFSHQKYLSAPERAHL | NKX3.1 | 16 | 1933 | DIVQGIESAEILQAVPSGEG | gp100 |
| | | | [138, 157] | | | | [488, 507] |
| 4 | 541 | MQDPAFVKQAVNLLQEANFH | NLRP4 | 16 | 1934 | GSTDNNVVAGDRPLIDWDQI | HAGE |
| | | | [560, 579] | | | | [157, 176] |
| 4 | 542 | SSRSVELNGFMAFREQYMGM | NR6A1 | 16 | 1935 | GSVAGAVKLNRQQTDMAVNW | HDAC2 |
| | | | [198, 217] | | | | [117, 136] |
| 4 | 543 | IFVNHSTAPYSVKNKLKPGQ | NXF2 | 16 | 1936 | RGSSPQVMSRSNGSVSRKPR | IGFS11 |
| | | | [194, 213] | | | | [378, 397] |
| 4 | 544 | EKNEEIFNYNNHLKNRIYQY | NY-BR-1 | 16 | 1937 | LPEIQELYQTLLAKPSPAQQ | JARID1B |
| | | | [1312, 1331] | | | | [1360, 1379] |
| 4 | 545 | SNLQNNYAHLTNSSINKSGA | NYD-TSPG | 16 | 1938 | SDLESIFKDAKIPVSGPFLV | KOC1 |
| | | | [288, 307] | | | | [16, 35] |
| 4 | 546 | ILTIRLTAADHRQLQLSISS | NY-ESO-1 | 16 | 1939 | SPLRSANTVVQSKAALAVTA | KU-CT-1 |
| | | | [132, 151] | | | | [446, 465] |
| 4 | 547 | EDSERLMEQQGALLKRLAEA | ODF2 | 16 | 1940 | QHGSLFFSTSKITSGKDYSV | LDHC |
| | | | [281, 300] | | | | [66, 85] |
| 4 | 548 | KASQPSFSIKGRSKLGGFSD | ODF3 | 16 | 1941 | PRLGYQAKLFKGVLKERMEG | LIPI |
| | | | [155, 174] | | | | [319, 338] |
| 4 | 549 | RITHSFRWMAQVLASELSLV | ODF4 | 16 | 1942 | YRQVPDSDPARYEFLWGPRA | MAGE-A1 |
| | | | [71, 90] | | | | [251, 270] |
| 4 | 550 | THNRLKSLMKILSEVTPDQS | OIP5 | 16 | 1943 | YRQVPGSDPARYEFLWGPRA | MAGE-A10 |
| | | | [206, 225] | | | | [283, 302] |
| 4 | 551 | DGPDVREGIMPTFDLTKVLE | PAGE2 | 16 | 1944 | YEFLWGPRAHAETSKMKVLE | MAGE-A11 |
| | | | [86, 105] | | | | [382, 401] |
| 4 | 552 | EVNPLYRADPVDLEFSVDQV | PASD1 | 16 | 1945 | ILGDPKKLLTQHFVQENYLE | MAGE-A3 |
| | | | [292, 311] | | | | [238, 257] |
| 4 | 553 | IILKVALNMARGLKYLHQEK | PBK | 16 | 1946 | ASESLKMIFGIDVKEVDPAS | MAGE-A4 |
| | | | [142, 161] | | | | [155, 174] |
| 4 | 554 | DHINRKYAFKAAHPNMRTYY | PEPP2 | 16 | 1947 | SVMGLYDGREHSVYWKLRKL | MAGE-A8 |
| | | | [228, 247] | | | | [229, 248] |
| 4 | 555 | VTPAMGMQMRKAIMIEVDDR | PIWIL1 | 16 | 1948 | YKMREPIMKADMLKVVDEKY | MAGE-B1 |
| | | | [518, 537] | | | | [123, 142] |
| 4 | 556 | ESVGLVSMFRGLGIETVSKT | PIWIL2 | 16 | 1949 | DGEEHSVFGEPWKLITKDLV | MAGE-B2 |
| | | | [67, 86] | | | | [234, 253] |
| 4 | 557 | FGERHIFDGNSLLLSRPLKE | PIWIL3 | 16 | 1950 | KVDSTKDSYVLVSKMDLPNN | MAGE-B3 |
| | | | [170, 189] | | | | [170, 189] |
| 4 | 558 | ADVSYKVLRNETVLEFMTAL | PIWIL4 | 16 | 1951 | NPTTHSYILVSMLGPNDGNQ | MAGE-B4 |
| | | | [261, 280] | | | | [170, 189] |
| 4 | 559 | HFLDISEDWSLHTDDMIGSM | PLAC1 | 16 | 1952 | LDEKVDELARFLLLKYQVKQ | MAGE-C1 |
| | | | [193, 212] | | | | [908, 927] |
| 4 | 560 | YLGQMINLRALLLSHIHASS | PRAME | 16 | 1953 | QATIDTADDATVMASESLSV | MAGE-C2 |
| | | | [255, 274] | | | | [345, 364] |
| 4 | 561 | DNDIALLLLASPIKLDDLKV | PRSS55 | 16 | 1954 | FNQIQNTYMVQYEKKIKRKL | MORC1 |
| | | | [154, 173] | | | | [866, 885] |
| 4 | 562 | EMKTYSVSFDSLFSAVKNFT | PSMA | 16 | 1955 | RTLDSVSQISNIDLLNLRDL | MPHOSPH1 |
| | | | [621, 640] | | | | [993, 1012] |
| 4 | 563 | ELMDMNIYELIRGRRYPLSE | RAGE-1 | 16 | 1956 | HNGTSARATTTPASKSTPFS | MUC-1 |
| | | | [83, 102] | | | | [974, 993] |
| 4 | 564 | EEEEDAAWQAEEVLRQQKLA | RCAS1 | 16 | 1957 | MAASFFSDFGLMWYLEELKK | NLRP4 |
| | | | [160, 179] | | | | [1, 20] |
| 4 | 565 | DQPQPNNVLSTVQPVIIYLT | SAGE1 | 16 | 1958 | LQMGMNRKAIREDGMPGGRN | NR6A1 |
| | | | [308, 327] | | | | [121, 140] |
| 4 | 566 | TDYVEIWQAYLDYLRRRVDF | SART3 | 16 | 1959 | DGYTRNWFKVTIPYGIKYDK | NXF2 |
| | | | [415, 434] | | | | [118, 137] |
| 4 | 567 | DKKTQTFLLETPEIYWKLDS | SCP-1 | 16 | 1960 | IDIHFLERKMQHHLLKEKNE | NY-BR-1 |
| | | | [793, 812] | | | | [1296, 1315] |
| 4 | 568 | QNEFKKEMAMLQKKIMMETQ | SCP3a | 16 | 1961 | RTTTPAFTLNIPSEANHTEQ | NYD-TSPG |
| | | | [201, 220] | | | | [19, 38] |
| 4 | 569 | HSFQSAYLIVDRDEAWVLET | SCRN1 | 16 | 1962 | ITPPSSEKLVSVMRLSDLST | ODF2 |
| | | | [151, 170] | | | | [91, 110] |
| 4 | 570 | LQFVIHSQHQNLRSVIQEME | se57-1 | 16 | 1963 | SSTVFLDTMPESPALSLQDF | PASD1 |
| | | | [246, 265] | | | | [268, 287] |
| 4 | 571 | IIFTTIAFFIYKRRLNENTD | SLCO6A1 | 16 | 1964 | KERPISMINEASNYNVTSDY | PEPP2 |
| | | | [681, 700] | | | | [115, 134] |
| 4 | 572 | IGEYKQLMRSRRQEMRQFFT | SOX-6 | 16 | 1965 | PLDNWLLIYTRRNYEAANSL | PIWIL1 |
| | | | [707, 726] | | | | [492, 511] |
| 4 | 573 | GSKVEDRFYNNHAFEEQEPP | SP17 | 16 | 1966 | DRIETYVRTIQSTLGAEGKI | PIWIL2 |
| | | | [61, 80] | | | | [647, 666] |
| 4 | 574 | SMKPLLRRAMAYETLEQYGK | SPAG1 | 16 | 1967 | DGDANSYIDTLRKYTRPTLQ | PIWIL3 |
| | | | [520, 539] | | | | [549, 568] |
| 4 | 575 | RLDSTLRLYHAHTYQHLQDV | SPAG9 | 16 | 1968 | GQLKTLIEYEVPQLLSSVAE | PIWIL4 |
| | | | [1107, 1126] | | | | [698, 717] |
| 4 | 576 | TILVVRYRRNVKRTSPEELL | SPAN-Xc | 16 | 1969 | TSPRRLVELAGQSLLKDEAL | PRAME |
| | | | [49, 68] | | | | [21, 40] |
| 4 | 577 | RWSHTRIFQVPSEMTEDIMR | SPATA19 | 16 | 1970 | PHLAGTEQNFQLAKQIQSQW | PSMA |
| | | | [118, 137] | | | | [81, 100] |
| 4 | 578 | ASIENIIQDIITSLARNEAP | SPO11 | 16 | 1971 | NFDFPFKKGSGIPLLTTNLS | RAGE-1 |
| | | | [49, 68] | | | | [236, 255] |
| 4 | 579 | TFGRLHRIIPKIMPKKPAED | SSX-1 | 16 | 1972 | AMSSRDLYATITHSVREEKM | SAGE1 |
| | | | [100, 119] | | | | [474, 493] |
| 4 | 580 | AWTHRLRERKQLVIYEEISD | SSX-2 | 16 | 1973 | AATEAPKMSNADFAKLFLRK | SART3 |
| | | | [163, 182] | | | | [944, 963] |
| 4 | 581 | AMTKLGFKAILPSFMRNKRV | SSX-3 | 16 | 1974 | EVEKAKVIADEAVKLQKEID | SCP-1 |
| | | | [57, 76] | | | | [681, 700] |
| 4 | 582 | TFGSLQRIFPKIMPKKPAEE | SSX-4 | 16 | 1975 | SGKPSVEDQFTRAYDFETED | SCP3a |
| | | | [100, 119] | | | | [12, 31] |
| 4 | 583 | EAMTKLGFKATLPPFMRNKR | SSX-5 | 16 | 1976 | EHPELRSYAQSQGWWTGEGE | SCRN1 |
| | | | [56, 75] | | | | [200, 219] |
| 4 | 584 | TNNKKKEFEETAKKVRRAIE | Survivin | 16 | 1977 | LKIKLQASREAGAAALRNVA | se57-1 |
| | | | [117, 136] | | | | [112, 131] |
| 4 | 585 | RKAEELLAAAAQRHQQLQQK | SYCE1 | 16 | 1978 | SGSQDEVSRGVEPLEAARAQ | SLCO6A1 |
| | | | [248, 267] | | | | [9, 28] |
| 4 | 586 | LRTLDKKTFYKTADISQMLV | TAF7L | 16 | 1979 | PERRKGSLADVVDTLKQKKL | SOX-6 |
| | | | [163, 182] | | | | [120, 139] |
| 4 | 587 | WMDYEFRVIASNILGTGEPS | TAG-1 | 16 | 1980 | DTFLLLIQSLKNNLIEKDPS | SPAG1 |
| | | | [678, 697] | | | | [848, 867] |
| 4 | 588 | YRASVLAYASEESVLVGYVD | TDRD1 | 16 | 1981 | NQYKERLMELQEAVRWTEMI | SPAG9 |
| | | | [559, 578] | | | | [516, 535] |
| 4 | 589 | GFWKSELSYELDRLLTENQN | TEKT5 | 16 | 1982 | VTDAKFVLIVEKDATFQRLL | SPO11 |
| | | | [149, 168] | | | | [214, 233] |
| 4 | 590 | QADDEPTFSFFSGPYMVMTN | TEX14 | 16 | 1983 | DRGSETTYESSADIAGDEGT | TAF7L |
| | | | [243, 262] | | | | [36, 55] |
| 4 | 591 | YIEIVMVSETIHFLKNSIAK | TEX15 | 16 | 1984 | GGAPGELIVNWTPMSREYQN | TAG-1 |
| | | | [2062, 2081] | | | | [721, 740] |
| 4 | 592 | MPMSEVSQVSRAAQMAVPSS | THEG | 16 | 1985 | GDGSWYRALVKEILPNGHVK | TDRD1 |
| | | | [247, 266] | | | | [775, 794] |
| 4 | 593 | FIKHFIIYSIPRYVADLKIQ | TPTE | 16 | 1986 | EEAEHLFETLSDQMWRQFTD | TEKT5 |
| | | | [415, 434] | | | | [318, 337] |
| 4 | 594 | DAGLVKMSRKPRASSPLSNN | TRAG-3 | 16 | 1987 | QAIIQGFSYDLLKKIDSPQR | TEX14 |
| | | | [62, 81] | | | | [152, 171] |
| 4 | 595 | LNAERSYKSQISTLHKSVVK | TSGA10 | 16 | 1988 | LKKAHRRVHTSLQLITKVGE | TEX15 |
| | | | [470, 489] | | | | [1004, 1023] |
| 4 | 596 | IWRDVIYSVRVGSPWIDQMT | TSP50 | 16 | 1989 | TPVWPIPRSSLEYRASSRLK | THEG |
| | | | [156, 175] | | | | [214, 233] |
| 4 | 597 | GEEAVLLLDDIMAEVEVVAE | TSPY1 | 16 | 1990 | RRILFIKHFIIYSIPRYVRD | TPTE |
| | | | [60, 79] | | | | [411, 430] |
| 4 | 598 | HYYVSMDALLGGSEIWRDID | TYR | 16 | 1991 | LLYEQAQEEITRLRREMMKS | TSGA10 |
| | | | [180, 199] | | | | [66, 85] |
| 4 | 599 | GAQYRIHTHGVFRGIQDVRR | WT1 | 16 | 1992 | IMHSRYRAQRFWSWVGQAND | TSP50 |
| | | | [283, 302] | | | | [187, 206] |
| 4 | 600 | TAITREEGGPRSGGAQAKLG | XAGE-1c | 16 | 1993 | AVQVELEPVNAQARKAFSRQ | TSPY1 |
| | | | [13, 32] | | | | [114, 133] |
| 4 | 601 | EGGTDVKGKILPKAEHFKMP | XAGE-2 | 16 | 1994 | HPTNPNLLSPASFFSSWQIV | TYR |
| | | | [83, 102] | | | | [256, 275] |
| 4 | 602 | DLERGTDEAVLQVQAHEHGQ | ZNF165 | 16 | 1995 | GHTPSHHAAQFPNHSFKHED | WT1 |
| | | | [126, 145] | | | | [161, 180] |
| 5 | 603 | EVRAGAFEHLPSLRQLDLSH | 5T4 | 16 | 1996 | FAESSDLTRHRRIHTGERPF | ZNF165 |
| | | | [132, 151] | | | | [381, 400] |
| 5 | 604 | SPNTLKEIEASAEVSPTTMT | ACRBP | 17 | 1997 | HMADMVTWLKETEVVQGKDR | 5T4 |
| | | | [131, 150] | | | | [301, 320] |
| 5 | 605 | DQLQMSLYASGLLTGVVVDS | ACTL8 | 17 | 1998 | SQASYKIVIEGKPYTVNLMQ | ADAM2 |
| | | | [131, 150] | | | | [43, 62] |
| 5 | 606 | SYLVLRPHDVAFLLVYREKS | ADAM2 | 17 | 1999 | IWTNKNLIVVDDVRKSVHLY | ADAM29 |
| | | | [256, 275] | | | | [250, 269] |
| 5 | 607 | DSEEKQFSTMRSGFMQNEIT | ADAM29 | 17 | 2000 | ESRTLHRNEYGIASILDSYQ | AFP |
| | | | [153, 172] | | | | [17, 36] |
| 5 | 608 | ASFVHEYSRRHPQLAVSVIL | AFP | 17 | 2001 | VSDLIDSFLRNLHSVTGTLM | AKAP-3 |
| | | | [352, 371] | | | | [330, 349] |
| 5 | 609 | DDFTASVSEGIMTYANSVVS | AKAP-3 | 17 | 2002 | SIDDLSFYVNRLSSLVIQMA | AKAP-4 |
| | | | [275, 294] | | | | [213, 232] |
| 5 | 610 | QWIAASQFNVPMLYFMGDKD | AKAP-4 | 17 | 2003 | MKGKGTRDKVLIRIMVSRSE | ANXA2 |
| | | | [779, 798] | | | | [278, 297] |
| 5 | 611 | RKYGKSLYYYIQQDTKGDYQ | ANXA2 | 17 | 2004 | SATEKVFKQQEIPSVFPKTS | BRDT |
| | | | [309, 328] | | | | [166, 185] |
| 5 | 612 | EPEDGTALDVHFVSTLEPLS | BAGE-2 | 17 | 2005 | PADPAQLAAQMLGKVSSIHS | CABYR |
| | | | [32, 51]; | | | | [169, 188] |
| | | | BAGE-3 | | | | |
| | | | [32, 51] | | | | |
| 5 | 613 | VGTIDMTLQSDIMTMFENNF | BRDT | 17 | 2006 | ALIQPVDTISISSLRQFETV | CAGE1 |
| | | | [927, 946] | | | | [105, 124] |
| 5 | 614 | DQSDVLMVDVATSMPVVIKE | CABYR | 17 | 2007 | IDQKNLNGKSQYYIMFGPDI | CALR3 |
| | | | [189, 208] | | | | [117, 136] |
| 5 | 615 | NNIENYSTNALIQPVDTISI | CAGE1 | 17 | 2008 | AVHQQQLLSWEEDRQKVLTL | CCDC62 |
| | | | [96, 115] | | | | [49, 68] |
| 5 | 616 | ESGSIEYDWNLTSLKKETSP | CALR3 | 17 | 2009 | LQQSLNQDFHQKTIVLQEGN | CDCA1 |
| | | | [192, 211] | | | | [190, 209] |
| 5 | 617 | ELHKRTEIIRSLTKKVKALE | CCDC62 | 17 | 2010 | LQESQKQLLQEAEVWKEQVS | CTAGE2 |
| | | | [78, 97] | | | | [188, 207] |
| 5 | 618 | EREKLKSQEIFLNLKTALEK | CDCA1 | 17 | 2011 | EEPGVTPQPYLGLLLEELRR | cTAGE5 |
| | | | [413, 432] | | | | [2, 21] |
| 5 | 619 | SPPASNMLKMEWSREVTTNA | CRISP2 | 17 | 2012 | VLQFHALEENVMVASEDSKL | CTCFL |
| | | | [52, 71] | | | | [150, 169] |
| 5 | 620 | TDKTEKVAVDPETVFKRPRE | CT45 | 17 | 2013 | RDEMAAARGALKKNATMLYT | CTNNA2 |
| | | | [2, 21] | | | | [203, 222] |
| 5 | 621 | PNKISTEHQSLVLVKRLLAV | CT46 | 17 | 2014 | QNETSYSRVLHGYAAQQLPS | DCAF12 |
| | | | [17, 36] | | | | [58, 77] |
| 5 | 622 | NDHILIENRQLSRLMVGPHA | CT47 | 17 | 2015 | RLFLKGNLLRGIDSLFSAPM | DKKL1 |
| | | | [137, 156] | | | | [57, 76] |
| 5 | 623 | SKSLKSQVAEAKMTFKRFQA | CTAGE2 | 17 | 2016 | NSYNVRRTEGFSVTLDDLAP | EPHA2 |
| | | | [150, 169] | | | | [480, 499] |
| 5 | 624 | VGFFAVLFFLWRSFRSVRSR | cTAGE5 | 17 | 2017 | FGVELPGNEEFQVVKDAVLD | FAM46D |
| | | | [50, 69] | | | | [87, 106] |
| 5 | 625 | SAVFHERYALIQHQKTHKNE | CTCFL | 17 | 2018 | LSKSNNRLKSLSIQYLELDR | FBXO39 |
| | | | [464, 483] | | | | [119, 138] |
| 5 | 626 | KNLMNAVVLTVKASYVASTK | CTNNA2 | 17 | 2019 | QLAEIDIKLQELSAASPTIS | FSIP1 |
| | | | [870, 889] | | | | [319, 338] |
| 5 | 627 | IDESIYFSSDVVTGNVPLKV | CXorf48 | 17 | 2020 | TKLEISGDEFLNFLLKLNKQ | GASZ |
| | | | [53, 72] | | | | [347, 366] |
| 5 | 628 | KRILVNLSMVENKLVELEHT | CXorf61 | 17 | 2021 | DKYWREYILSLEELVNGMYR | Glypican-3 |
| | | | [78, 97] | | | | [293, 312] |
| 5 | 629 | NRRKSRRFIPRPPSVAPPPM | DBPC | 17 | 2022 | RNQPLTFALQLHDPSGYLAE | gp100 |
| | | | [176, 195] | | | | [234, 253] |
| 5 | 630 | EVRLQNETSYSRVLHGYAAQ | DCAF12 | 17 | 2023 | GTLDLVAVSSVKQNIIVTTE | HAGE |
| | | | [54, 73] | | | | [451, 470] |
| 5 | 631 | LQGFSALFLKGNLLAGIDSL | DKKL1 | 17 | 2024 | PHAPGVQMQAIPEDAVHEDS | HDAC2 |
| | | | [52, 71] | | | | [375, 394] |
| 5 | 632 | NLIAERQRVMAAQVALRRQQ | DMRT1 | 17 | 2025 | SSNAYNSRYWSNNPKVHRNT | IGFS11 |
| | | | [106, 125] | | | | [313, 332] |
| 5 | 633 | RKAVTKRARLQRSYEMNERA | DPPA2 | 17 | 2026 | AKINKKKSLVSFKALIEESE | JARID1B |
| | | | [150, 169] | | | | [768, 787] |
| 5 | 634 | KTQNDVDIADVAYYFEKDVK | EpCAM | 17 | 2027 | NDIASMNLQAHLIPGLNLNA | KOC1 |
| | | | [202, 221] | | | | [353, 372] |
| 5 | 635 | GLVTSASFRTASVSINQTEP | EPHA2 | 17 | 2028 | LLGSENDGTKIAASQAISAM | KU-CT-1 |
| | | | [420, 439] | | | | [324, 343] |
| 5 | 636 | KQLENKKTGSKALAEFEEKM | FAM133A | 17 | 2029 | ETRLALVQRNVAIMKSIIPA | LDHC |
| | | | [46, 65] | | | | [104, 123] |
| 5 | 637 | IVKDARLNGSVASYILASHN | FAM46D | 17 | 2030 | LQNFVRILLNEEDMNVIVVD | LIPI |
| | | | [57, 76] | | | | [114, 133] |
| 5 | 638 | EFNVLEMEVMRRQLYAVNRR | FATE1 | 17 | 2031 | QGASAFPTTINFTRQRQPSE | MAGE-A1 |
| | | | [128, 147] | | | | [59, 78] |
| 5 | 639 | RKLFYFKIWAFLDVSFVERI | FBXO39 | 17 | 2032 | ITKAEILESVIRNYEDHFPL | MAGE-A10 |
| | | | [366, 385] | | | | [155, 174] |
| 5 | 640 | KAKGRNRRSHRAMRVAHLEL | FMR1NB | 17 | 2033 | FGEPKRLLTQNWVQEKYLVY | MAGE-A11 |
| | | | [7, 26] | | | | [352, 371] |
| 5 | 641 | PVFPQLSRSIISKLLNESET | FSIP1 | 17 | 2034 | ASEEEIWEELGVMGVYDGRE | MAGE-A4 |
| | | | [439, 458] | | | | [217, 236] |
| 5 | 642 | KNVNQSLLDLYQLAVEKGDP | FTHL17 | 17 | 2035 | KLVHFLLLKYRAREPVTKAE | MAGE-A6 |
| | | | [109, 128] | | | | [115, 134] |
| 5 | 643 | GWEIGYLDRTSQKLKRLLPI | GASZ | 17 | 2036 | MLLGQKSQRYKAEEGLQAQG | MAGE-A8 |
| | | | [24, 43] | | | | [1, 20] |
| 5 | 644 | SSLSHISPFSHSSHMLTTPT | GATA-3 | 17 | 2037 | NLSNDWDFPRNGLLMPLLGV | MAGE-B1 |
| | | | [402, 421] | | | | [188, 207] |
| 5 | 645 | KHINQLLRTMSMPKGRVLDK | Glypican-3 | 17 | 2038 | SLLSSWDFPRRKLLMPLLGV | MAGE-B2 |
| | | | [467, 486] | | | | [191, 210] |
| 5 | 646 | LNVSLADTNSLAVVSTQLIM | gp100 | 17 | 2039 | VDVSYKKSYKGANSKIEKKQ | MAGE-B3 |
| | | | [567, 586] | | | | [75, 94] |
| 5 | 647 | RNRPGMLVLTPTRELALQVE | HAGE | 17 | 2040 | ARPAVAARRGTTAMTSAYSR | MAGE-B4 |
| | | | [314, 333] | | | | [317, 336] |
| 5 | 648 | FKPVMSKVMEMFQPSAVVLQ | HDAC1 | 17 | 2041 | PQSPLQGEEFQSSLQSPVSI | MAGE-C1 |
| | | | [241, 260] | | | | [612, 631] |
| 5 | 649 | RQQTDMAVNWAGGLHHAKKS | HDAC2 | 17 | 2042 | ASEEVIWEVLNAVGVYAGRE | MAGE-C2 |
| | | | [127, 146] | | | | [244, 263] |
| 5 | 650 | QSYKHLFQPVINQVVDFYQP | HDAC3 | 17 | 2043 | HESLSSFELSASRRGQKRNI | MORC1 |
| | | | [230, 249] | | | | [606, 625] |
| 5 | 651 | SPSRQQSKAHRHRHRRGYSR | HOM-TES-85 | 17 | 2044 | VKDLLKGQSRLIFTYGLTNS | MPHOSPH1 |
| | | | [59, 78] | | | | [137, 156] |
| 5 | 652 | LLLSLHGVAASLEVSESPGS | IGFS11 | 17 | 2045 | PPLTSSNHSTSPQLSTGVSF | MUC-1 |
| | | | [12, 31] | | | | [1023, 1042] |
| 5 | 653 | DGFDLNKGIEAKIHTLLPWQ | IL13RA2 | 17 | 2046 | EVLFYQPDLKYLSFTLTKLS | NLRP4 |
| | | | [93, 112] | | | | [688, 707] |
| 5 | 654 | EGDALRYMIERTVNWQHRAQ | JARID1B | 17 | 2047 | KENFTGSETLKHLVLQFLQQ | NXF2 |
| | | | [1248, 1267] | | | | [379, 398] |
| 5 | 655 | RNIPPHLQWEVLDSLLVQYG | KOC1 | 17 | 2048 | QEKENKYFEDIKILKEKNAE | NY-BR-1 |
| | | | [86, 105] | | | | [1070, 1089] |
| 5 | 656 | DVGYGRSISSSSSLRRSSKE | KU-CT-1 | 17 | 2049 | SWDVDDLLLWKKIHRMVILT | NYD-TSPG |
| | | | [621, 640] | | | | [333, 352] |
| 5 | 657 | SRLLQLHITMPFSSPMEAEL | Lage-1 | 17 | 2050 | EKSEEYAEQLHVQLADKDLY | ODF2 |
| | | | [85, 104] | | | | [414, 433] |
| 5 | 658 | LKGEMMDLQHGSLFFSTSKI | LDHC | 17 | 2051 | QKQPNTLRHVVIPDLQSSEA | PASD1 |
| | | | [58, 77] | | | | [410, 429] |
| 5 | 659 | QTIESWREEGFPVGLKLAVL | LEMD1 | 17 | 2052 | RGTTEIGMIGSKPFSTVKYK | PEPP2 |
| | | | [142, 161] | | | | [779, 798] |
| 5 | 660 | TYKIQALMLKSLTYPERPPL | LIPI | 17 | 2053 | KSIGRGYNPRLTVIVVKKRV | PIWIL1 |
| | | | [437, 456] | | | | [725, 744] |
| 5 | 661 | QSPQGASAFPTTINFTRQRQ | MAGE-A1 | 17 | 2054 | YHDPSAGMRSVVGFVASINL | PIWIL2 |
| | | | [56, 75] | | | | [747, 766] |
| 5 | 662 | PRAHAEIRKMSLLKFLAKVN | MAGE-A10 | 17 | 2055 | SPNNFTLAFIVVKKRINTRF | PIWIL3 |
| | | | [300, 319] | | | | [750, 769] |
| 5 | 663 | EESFSPTAMDAIFGSLSDEG | MAGE-A11 | 17 | 2056 | MSGRARVKARGIARSPSATE | PIWIL4 |
| | | | [177, 196] | | | | [1, 20] |
| 5 | 664 | DGREDSVFAHPRKLLTQDLV | MAGE-A12 | 17 | 2057 | DVLLAQEVRPRTWKLQVLDL | PRAME |
| | | | [232, 251] | | | | [105, 124] |
| 5 | 665 | AISRKMVELVHFLLLKYRAR | MAGE-A2 | 17 | 2058 | KFSGYPLYHSVYETYELVEK | PSMA |
| | | | [108, 127] | | | | [545, 564] |
| 5 | 666 | KLLTQHFVQENYLEYRQVPG | MAGE-A3 | 17 | 2059 | RSVYSKQPYTEYISTRWYRA | RAGE-1 |
| | | | [244, 263] | | | | [150, 169] |
| 5 | 667 | LLIIVLGTIAMEGDSASEEE | MAGE-A4 | 17 | 2060 | KMENVQPAPDNVLLTLRPRR | SAGE1 |
| | | | [202, 221] | | | | [210, 229] |
| 5 | 668 | LDTQEEALGLVGVQAATTEE | MAGE-A5 | 17 | 2061 | LALWEAYREFESAIVEAARL | SART3 |
| | | | [16, 35] | | | | [225, 244] |
| 5 | 669 | FPVIFSKASDSLQLVFGIEL | MAGE-A6 | 17 | 2062 | TEKENKMKDLTFLLEESRDK | SCP-1 |
| | | | [147, 166] | | | | [276, 295] |
| 5 | 670 | QEALKLKVAELVHFLLHKYR | MAGE-A9 | 17 | 2063 | EYSQQFLTLFQQWDLDMQKA | SCP3a |
| | | | [105, 124] | | | | [124, 143] |
| 5 | 671 | STESSVKDPVAWEAGMLMHF | MAGE-B1 | 17 | 2064 | AHEWARAIIESDQEQGRKLR | SCRN1 |
| | | | [99, 118] | | | | [350, 369] |
| 5 | 672 | KIVGKRFREHFPEILKKASE | MAGE-B2 | 17 | 2065 | QDLQREISILQEQISHLQFV | se57-1 |
| | | | [139, 158] | | | | [230, 249] |
| 5 | 673 | TVPSAFQFWYEEALRDEEER | MAGE-B3 | 17 | 2066 | IKEGLITADAEGDFIDARPG | SLCO6A1 |
| | | | [298, 317] | | | | [550, 569] |
| 5 | 674 | KEVNPTTHSYILVSMLGPND | MAGE-B4 | 17 | 2067 | DQDTVMKAIQEARKMREQIQ | SOX-6 |
| | | | [167, 186] | | | | [492, 511] |
| 5 | 675 | DEESVSASQKAIIFKRLSKD | MAGE-B6 | 17 | 2068 | QLANDSVNALSRILMELDGP | SPAG1 |
| | | | [174, 193] | | | | [555, 574] |
| 5 | 676 | PVSPSFSSTLVSLFQSSPER | MAGE-C1 | 17 | 2069 | DVLQGELEAVKQAKLKLEEK | SPAG9 |
| | | | [271, 290] | | | | [446, 465] |
| 5 | 677 | DSESSFTYTLDEKVAELVEF | MAGE-C2 | 17 | 2070 | TAVAVPSNIQGIRNLVTDAK | SPO11 |
| | | | [132, 151] | | | | [199, 218] |
| 5 | 678 | STTHSFLFGALAELLDNARD | MORC1 | 17 | 2071 | SEEYLERQLQAEFIESGQYR | TAF7L |
| | | | [22, 41] | | | | [363, 382] |
| 5 | 679 | SSKKTYSLRSQASIIGVNLA | MPHOSPH1 | 17 | 2072 | KWDPVVPFRNESAVTGYKML | TAG-1 |
| | | | [1703, 1722] | | | | [931, 950] |
| 5 | 680 | LQRDISEMFLQIYKQGGFLG | MUC-1 | 17 | 2073 | KYTSDDFWYRAVVLGTSDTD | TDRD1 |
| | | | [1069, 1088] | | | | [1000, 1019] |
| 5 | 681 | AETEPERHLGSYLLDSENTS | NKX3.1 | 17 | 2074 | YRYLNSWRPSLFYKIANVQT | TEKT5 |
| | | | [91, 110] | | | | [44, 63] |
| 5 | 682 | RNKSVRYLDLSANVLKDEGL | NLRP4 | 17 | 2075 | TGLKRLSSFIGAGSPSLVKA | TEX14 |
| | | | [805, 824] | | | | [1283, 1302] |
| 5 | 683 | STWQELILLSSLTVYSKQIF | NR6A1 | 17 | 2076 | NDKNSKVLMQNAATYWNELP | TEX15 |
| | | | [322, 341] | | | | [2618, 2637] |
| 5 | 684 | QMEMLKLTMNKRYNVSQQAL | NXF2 | 17 | 2077 | RKRRRRRRLMELAEPKINWQ | THEG |
| | | | [213, 232] | | | | [120, 139] |
| 5 | 685 | ITKRSEQIVEFLLIKNANAN | NY-BR-1 | 17 | 2078 | QVKHLYNWNLPPRRILFIKH | TPTE |
| | | | [124, 143] | | | | [399, 418] |
| 5 | 686 | LVFRVDETTPAVVQSVLLER | NYD-TSPG | 17 | 2079 | IKLDSSKELLNRQLVAKDQE | TSGA10 |
| | | | [87, 106] | | | | [516, 535] |
| 5 | 687 | LELEIIVLNDRVTDLVNQQQ | ODF2 | 17 | 2080 | ADGMWPQFRTIQEKEVIILN | TSP50 |
| | | | [458, 477] | | | | [250, 269] |
| 5 | 688 | SPGPRYNVNPKILRTGKDLG | ODF3 | 17 | 2081 | FFNWFSDHNFAGSNKIAEIL | TSPY1 |
| | | | [65, 84] | | | | [257, 276] |
| 5 | 689 | AFSKKWLDLSRSLFYQRWPV | ODF4 | 17 | 2082 | PWHRLFLLRWEQEIQKLTGD | TYR |
| | | | [99, 118] | | | | [209, 228] |
| 5 | 690 | YLLKTKAIVNASEMDIQNVP | OIP5 | 17 | 2083 | LQPVETKAHFDSSEPQLLWD | ZNF165 |
| | | | [172, 191] | | | | [163, 182] |
| 5 | 691 | ILRTQLLQQLYTSKAVSDEA | PASD1 | 18 | 2084 | YLPRDVLAQLPSLRHLDLSN | 5T4 |
| | | | [175, 194] | | | | [224, 243] |
| 5 | 692 | VYQKRLMDEAKILKSLHHPN | PBK | 18 | 2085 | SIIKEGIESQASYKIVIEGK | ADAM2 |
| | | | [77, 96] | | | | [35, 54] |
| 5 | 693 | WQQRQFYNKQSTLPRHSTLS | PEPP2 | 18 | 2086 | KVLLFGLEIWTNKNLIVVDD | ADAM29 |
| | | | [506, 525] | | | | [242, 261] |
| 5 | 694 | RRSIAGFVASINEGMTRWFS | PIWIL1 | 18 | 2087 | EGLSPNLNRFLGDADFNQFS | AFP |
| | | | [641, 660] | | | | [324, 343] |
| 5 | 695 | KWYSRVVFQMPHQEIVDSLK | PIWIL2 | 18 | 2088 | AQDKAESYSLISMKGMGDPK | AKAP-3 |
| | | | [770, 789] | | | | [397, 416] |
| 5 | 696 | LHSWLILYSRSSHREAMSLK | PIWIL3 | 18 | 2089 | RNQSLEFSTMKAEMKERDKG | AKAP-4 |
| | | | [507, 526] | | | | [461, 480] |
| 5 | 697 | QENPAAFVRAIQQYVDPDVQ | PIWIL4 | 18 | 2090 | AKGRRAEDGSVIDYELIDQD | ANXA2 |
| | | | [526, 545] | | | | [175, 194] |
| 5 | 698 | HQAGAQEAQPLQPSHFLDIS | PLAC1 | 18 | 2091 | PSVFPKTSISPLNVVQGASV | BRDT |
| | | | [179, 198] | | | | [178, 197] |
| 5 | 699 | SLLKDEALAIAALELLPREL | PRAME | 18 | 2092 | YRGNTTMDIKDLVKQFHQIK | CABYR |
| | | | [33, 52] | | | | [47, 66] |
| 5 | 700 | GDRSIFEGATRYSRITGGME | PRSS5 | 5 18 | 2093 | ERPEIVSTWSSAGISWRSEA | CAGE1 |
| | | | [54, 73] | | | | [260, 279] |
| 5 | 701 | STNEVTRIYNVIGTLAGAVE | PSMA | 18 | 2094 | TQNGRFYAISARFKPFSNKG | CALR3 |
| | | | [348, 367] | | | | [69, 88] |
| 5 | 702 | VFYEIASLQPLFPGVNELDQ | RAGE-1 | 18 | 2095 | QERTNSELHNLRQIYVKQQS | CCDC62 |
| | | | [191, 210] | | | | [275, 294] |
| 5 | 703 | QQRKKMEKEAQRLMKKEQNK | RCAS1 | 18 | 2096 | YAKIDEKTAELKRKMFKMST | CDCA1 |
| | | | [188, 207] | | | | [445, 464] |
| 5 | 704 | QSRTDKVLSTAPPQLVHMAA | SAGE1 | 18 | 2097 | EEKLSKVDEMISHATEELET | CTAGE2 |
| | | | [121, 140] | | | | [381, 400] |
| 5 | 705 | NAKYANMWLEYYNLERAHGD | SART3 | 18 | 2098 | LLLEELRRVVAALPEGMRPD | cTAGE5 |
| | | | [504, 523] | | | | [14, 33] |
| 5 | 706 | MEESNKARAAHSFVVTEFET | SCP-1 | 18 | 2099 | QEGVQVVVQQPGPGLLWLEE | CTCFL |
| | | | [363, 382] | | | | [105, 124] |
| 5 | 707 | KILQQSRIVQSQRLKTIKQL | SCP3a | 18 | 2100 | PKSLEIRTLTVERLLEPLVT | CTNNA2 |
| | | | [159, 178] | | | | [14, 33] |
| 5 | 708 | GETAKEALDVIVSLLEEHGQ | SCRN1 | 18 | 2101 | NTLFVVDVQTSQITKIPILK | DCAF12 |
| | | | [120, 139] | | | | [110, 129] |
| 5 | 709 | IEETEYVKKIRTTLQKIRTQ | se57-1 | 18 | 2102 | AAPIHDADAQESSLGLTGLQ | DKKL1 |
| | | | [31, 50] | | | | [30, 49] |
| 5 | 710 | EKSYDISSGLVAIFIAFYGD | SLCO6A1 | 18 | 2103 | GKIPIRWTAPEAISYRKFTS | EPHA2 |
| | | | [148, 167] | | | | [777, 796] |
| 5 | 711 | SYNHKQIEQLYAAQLASMQV | SOX-6 | 18 | 2104 | LKFVSSLRRQFEFSVDSFQI | FAM46D |
| | | | [360, 379] | | | | [159, 178] |
| 5 | 712 | ISGKEEETSVTILDSSEEDK | SP17 | 18 | 2105 | AKLARQATNLKVNFFFERIM | FBXO39 |
| | | | [92, 111] | | | | [274, 293] |
| 5 | 713 | SGDYEEAVMYYTRSISALPT | SPAG1 | 18 | 2106 | TQIPPEEYEMQMQKLNKDFT | FSIP1 |
| | | | [222, 241] | | | | [202, 221] |
| 5 | 714 | GREVENLILENTQLLETKNA | SPAG9 | 18 | 2107 | IAKRNKHHEIFNLLSFTLNP | GASZ |
| | | | [407, 426] | | | | [221, 240] |
| 5 | 715 | IDVVESEAVSVLHHWLKKTE | SPATA19 | 18 | 2108 | NYTNAMFKNNYPSLTPQAFE | Glypican-3 |
| | | | [28, 47] | | | | [124, 143] |
| 5 | 716 | YATKRDIYYTDSQLFGNQTV | SPO11 | 18 | 2109 | VNNTIINGSQVWGGQPVYPQ | gp100 |
| | | | [130, 149] | | | | [105, 124] |
| 5 | 717 | HRLRERKQLVIYEEISDPEE | SSX-1 | 18 | 2110 | KTGKVRILIATDLASRGLDV | HAGE |
| | | | [166, 185]; | | | | [534, 553] |
| | | | SSX-2 | | | | |
| | | | [166, 185] | | | | |
| 5 | 718 | QIPEKIQKAFDDIAKYFSKE | SSX-2 | 18 | 2111 | DVDKLHFTPRIQRLNELEAQ | JARID1B |
| | | | [16, 35] | | | | [77, 96] |
| 5 | 719 | PGKPTTSEKINMISGVLQRY | SSX-3 | 18 | 2112 | GPPEAQFKAQGRIYGKIKEE | KOC1 |
| | | | [142, 161] | | | | [458, 477] |
| 5 | 720 | GKHAWTHRLRERKQLVVYEE | 55X-4 | 18 | 2113 | LANMSAEYTSKVQIFEHGGL | KU-CT-1 |
| | | | [160, 179] | | | | [133, 152] |
| 5 | 721 | ATLPPFMRNKRVADFQGNDF | SSX-5 | 18 | 2114 | GTDSDKEHWKNIHKQVIQSA | LDHC |
| | | | [65, 84] | | | | [219, 238] |
| 5 | 722 | AFLSVKKQFEELTLGEFLKL | Survivin | 18 | 2115 | LEFSQLSVKDSFRDLFIPRI | LIPI |
| | | | [85, 104] | | | | [43, 62] |
| 5 | 723 | AEGPSTLDEGLFLRSQEAAA | SYCE1 | 18 | 2116 | ALAETSYVKVLEYVIKVSAR | MAGE-A1 |
| | | | [219, 238] | | | | [270, 289] |
| 5 | 724 | DEVPDEVENQFILRLPLEHA | TAF7L | 18 | 2117 | ESVIRNYEDHFPLLFSEASE | MAGE-A10 |
| | | | [92, 111] | | | | [162, 181] |
| 5 | 725 | NESAVTGYKMLYQNDLHLTP | TAG-1 | 18 | 2118 | RAHAETSKMKVLEYIANANG | MAGE-A11 |
| | | | [940, 959] | | | | [389, 408] |
| 5 | 726 | DKTIQANVLEIISPNLFYAL | TDRD1 | 18 | 2119 | PDAESLFREALSNKVDELAH | MAGE-A4 |
| | | | [939, 958] | | | | [100, 119] |
| 5 | 727 | DNIKHSQNMRANSIQLREEA | TEKT5 | 18 | 2120 | DLESEFQAALSRKVAKLVHF | MAGE-A6 |
| | | | [301, 320] | | | | [100, 119] |
| 5 | 728 | QGFIHRSLSSYAVHIISPGE | TEX14 | 18 | 2121 | EEIWKFMNVLGAYDGEEHLI | MAGE-B1 |
| | | | [370, 389] | | | | [218, 237] |
| 5 | 729 | VTELEYNYNQFSTLLKNVMS | TEX15 | 18 | 2122 | RGQKSKLRAREKRRKARDET | MAGE-B2 |
| | | | [2198, 2217] | | | | [3, 22] |
| 5 | 730 | PKIRDNFWSMPMSEVSQVSR | THEG | 18 | 2123 | EFLNKMRIYDGKKHFIFGEP | MAGE-B3 |
| | | | [238, 257] | | | | [225, 244] |
| 5 | 731 | SFYFWLHTSFIENNRLYLPK | TPTE | 18 | 2124 | GEPRKLITQDLVQEKYLEYQ | MAGE-B4 |
| | | | [493, 512] | | | | [239, 258] |
| 5 | 732 | VLGEAWRDQVDWSRLLRDAG | TRAG-3 | 18 | 2125 | DDSTATESASSSVMSPSFSS | MAGE-C1 |
| | | | [45, 64] | | | | [1122, 1141] |
| 5 | 733 | KARQSEADNNTLKLELITAE | TSGA10 | 18 | 2126 | LLVIYNLKLLLNGEPELDVK | MORC1 |
| | | | [430, 449] | | | | [197, 216] |
| 5 | 734 | DPEAVARRWPWMVSVRANGT | TSP50 | 18 | 2127 | LPRTLNVLFDSLQERLYTKM | MPHOSPH1 |
| | | | [116, 135] | | | | [172, 191] |
| 5 | 735 | FWANVIANHPQMSALITDED | TSPY1 | 18 | 2128 | LFEMQDPAFVKQAVNLLQEA | NLRP4 |
| | | | [158, 177] | | | | [557, 576] |
| 5 | 736 | DSFQDYIKSYLEQASRIWSW | TYR | 18 | 2129 | FFVQDASAASALKDVSYKIY | NXF2 |
| | | | [458, 477] | | | | [166, 185] |
| 5 | 737 | GATLKGVAAGSSSSVKWTEG | WT1 | 18 | 2130 | KKEIAMLKLEIATLKHQYQE | NY-BR-1 |
| | | | [244, 263] | | | | [1052, 1071] |
| 5 | 738 | WRGRSTYRPRPRRSLQPPEL | XAGE-2 | 18 | 2131 | LTFVMPNDYTKFVAEYFQER | NYD-TSPG |
| | | | [3, 22] | | | | [180, 199] |
| 5 | 739 | GKTFRVSSHLIRHFRIHTGE | ZNF165 | 18 | 2132 | EMDGAAAAKQVMALKDTIGK | ODF2 |
| | | | [434, 453] | | | | [215, 234] |
| 6 | 740 | LQGLRRLELASNHFLYLPRD | 5T4 | 18 | 2133 | KDEVYQKIILKFPLLNSETH | PASD1 |
| | | | [209, 228] | | | | [86, 105] |
| 6 | 741 | EDVRVSGWLQTEFLSFQDGD | ACPBP | 18 | 2134 | NLRDNPFRTTQTRRRDDKEL | PEPP2 |
| | | | [452, 471] | | | | [940, 959] |
| 6 | 742 | MQRVAPEMFFSPQVFEQPGP | ACTL8 | 18 | 2135 | QETAQLVGSTASQQPGYIQP | PIWIL1 |
| | | | [251, 270] | | | | [16, 35] |
| 6 | 743 | GLGGLRMDSNFDSLPVQITV | ADAM2 | 18 | 2136 | AMDQARELVNMLEKIAGPIG | PIWIL2 |
| | | | [10, 29] | | | | [614, 633] |
| 6 | 744 | LQINDFAYEIKPLAFSTTFE | ADAM29 | 18 | 2137 | SHREAMSLKGHLQSVTAPMG | PIWIL3 |
| | | | [127, 146] | | | | [518, 537] |
| 6 | 745 | DLATIFFAQFVQEATYKEVS | AFP | 18 | 2138 | ARLVDNIQRNTNARFELETW | PIWIL4 |
| | | | [45, 64] | | | | [415, 434] |
| 6 | 746 | NRNVNFAMKSETKLREKMYS | AKAP-3 | 18 | 2139 | SQLTTLSFYGNSISISALQS | PRAME |
| | | | [417, 436] | | | | [406, 425] |
| 6 | 747 | SKGLMVYANQVASDMMVSLM | AKAP-4 | 18 | 2140 | WNLLHETDSAVATARRPRWL | PSMA |
| | | | [330, 349] | | | | [2, 21] |
| 6 | 748 | SDTSGDFRKLMVALAKGRRA | ANXA2 | 18 | 2141 | GEGTFSEVMKMQSLRDGNYY | RAGE-1 |
| | | | [161, 180] | | | | [11, 30] |
| 6 | 749 | VDAVKLQLPDYYTIIKNPMD | BRDT | 18 | 2142 | MSTRDQYAAVTHNIREEKIN | SAGE1 |
| | | | [56, 75] | | | | [616, 635] |
| 6 | 750 | SKPRLVVPYGLKTLLEGISR | CABYR | 18 | 2143 | LDRQLKVKDLVLSVHNRAIR | SART3 |
| | | | [4, 23] | | | | [354, 373] |
| 6 | 751 | YHSLNEELDFLVTSYEEIIE | CAGE1 | 18 | 2144 | QENRKIIEAQRKAIQELQFG | SCP-1 |
| | | | [694, 713] | | | | [135, 154] |
| 6 | 752 | AISARFKPFSNKGKTLVIQY | CALR3 | 18 | 2145 | MFRQQQKILQQSRIVQSQRL | SCP3a |
| | | | [76, 95] | | | | [153, 172] |
| 6 | 753 | DKELNDMVAVHQQQLLSWEE | CCDC62 | 18 | 2146 | SLDLLMKKIKGKDLQLLEMN | se57-1 |
| | | | [41, 60] | | | | [87, 106] |
| 6 | 754 | LKTEENSFKRLMIVKKEKLA | CDCA1 | 18 | 2147 | EPHIKRPMNAFMVWAKDERR | SOX-6 |
| | | | [334, 353] | | | | [618, 637] |
| 6 | 755 | QLQVQREIVNKHNELRKAVS | CPISP2 | 18 | 2148 | IIEAKMELEEVTRLLNLKDK | SPAG1 |
| | | | [33, 52] | | | | [724, 743] |
| 6 | 756 | AMSKAKKLMTGHAIPPSQLD | CT45 | 18 | 2149 | SVTKAERSHLIVWQVMYGNE | SPAG9 |
| | | | [51, 70] | | | | [1302, 1321] |
| 6 | 757 | SNESSMLSTDTKKASILLIR | CT46 | 18 | 2150 | ITGKGVPDLNTRLLVKKLWD | SPO11 |
| | | | [136, 155] | | | | [247, 266] |
| 6 | 758 | EEGEQAAGLAAVPRGGSAEE | CT47 | 18 | 2151 | PLKNVRKKRFRKTQKKVPDV | TAF7L |
| | | | [64, 83] | | | | [225, 244] |
| 6 | 759 | TELYQENEMKLYRKLIVEEK | CTAGE2 | 18 | 2152 | SSSLSIKWDPVVPFRNESAV | TAG-1 |
| | | | [356, 375] | | | | [925, 944] |
| 6 | 760 | SKSLKSQVAEAKMTFKIFQM | cTAGE5 | 18 | 2153 | QKKAHVLYIDYGNEEIIPLN | TDRD1 |
| | | | [180, 199] | | | | [341, 360] |
| 6 | 761 | NMAFVTSGELVRHRRYKHTH | CTCFL | 18 | 2154 | ELDRLLTENQNLETVKRRLE | TEKT5 |
| | | | [319, 338] | | | | [158, 177] |
| 6 | 762 | RGSQKKHISPVQALSEFKAM | CTNNA2 | 18 | 2155 | FDDWDWQNGSLSSLSLPEST | TEX14 |
| | | | [931, 950] | | | | [696, 715] |
| 6 | 763 | VTSINEDNIYISNSIYFSIA | CXorf48 | 18 | 2156 | QHSVEYEGNIHTSLAIAQKL | TEX15 |
| | | | [118, 137] | | | | [343, 362] |
| 6 | 764 | NSTALALVRPSSSGLINSNT | CXorf61 | 18 | 2157 | AAQMAVPSSRILQLSKPKAP | THEG |
| | | | [34, 53] | | | | [258, 277] |
| 6 | 765 | HQTAIKRNNPRKFLRSVGDG | DBPC | 18 | 2158 | DIKLLRNIPRWTHLLRLLRL | TPTE |
| | | | [122, 141] | | | | [180, 199] |
| 6 | 766 | SRVPVYAHITHKALKDIPKE | DCAF12 | 18 | 2159 | EESENRQMMEQLRKANEDAE | TSGA10 |
| | | | [227, 246] | | | | [406, 425] |
| 6 | 767 | STLVIPSAAAPIHDADAQES | DKKL1 | 18 | 2160 | SAKEGTAFRMEAVQEGAAGV | TSPY1 |
| | | | [22, 41] | | | | [33, 52] |
| 6 | 768 | QSVPQFFTFEDAPSYPEARA | DMRT1 | 18 | 2161 | TERRLLVRRNIFDLSAPEKD | TYR |
| | | | [302, 321] | | | | [113, 132] |
| 6 | 769 | GRLLSADTKGWVRLQFHAGQ | DPPA2 | 18 | 2162 | AQDEGFGKILTHKNTVRGEI | ZNF165 |
| | | | [228, 247] | | | | [250, 269] |
| 6 | 770 | FITSILYENNVITIDLVQNS | EpCAM | 19 | 2163 | SSSAPFLASAVSAQPPLPDQ | 5T4 |
| | | | [180, 199] | | | | [42, 61] |
| 6 | 771 | AISYRKFTSASDVWSFGIVM | EPHA2 | 19 | 2164 | GLRGVLQFENVSYGIEPLES | ADAM2 |
| | | | [788, 807] | | | | [113, 132] |
| 6 | 772 | SVDSFQIVLDPMLPFYSDKN | FAM46D | 19 | 2165 | EIPNMSDHTTVHWARFNDIM | ADAM29 |
| | | | [172, 191] | | | | [561, 580] |
| 6 | 773 | PGTDAVAQTSLEEFNVLEME | FATE1 | 19 | 2166 | VMKNFGTRTFQAITVTKLSQ | AFP |
| | | | [116, 135] | | | | [226, 245] |
| 6 | 774 | MGKRLDYLNLKGARLTVEQG | FBXO39 | 19 | 2167 | GRRDARSFVEAAGTTNFPAN | AKAP-3 |
| | | | [160, 179] | | | | [543, 562] |
| 6 | 775 | KRKRKSEMLQKAARGREEHG | FMR1NB | 19 | 2168 | NRLSSLVIQMAHKEIKEKLE | AKAP-4 |
| | | | [234, 253] | | | | [222, 241] |
| 6 | 776 | KRPSFLDDPLYGISVSLSSE | FSIP1 | 19 | 2169 | LYYYIQQDTKGDYQKALLYL | ANXA2 |
| | | | [533, 552] | | | | [315, 334] |
| 6 | 777 | HFLESHYLHEQVKTIKELGG | FTHL17 | 19 | 2170 | SSDELFNQFRKAAIEKEVKA | BRDT |
| | | | [132, 151] | | | | [821, 840] |
| 6 | 778 | HHEIFNLLSFTLNPLEGKLQ | GASZ | 19 | 2171 | IKIGSEKSLHLEVEITSIVS | CABYR |
| | | | [227, 246] | | | | [409, 428] |
| 6 | 779 | DQPRWVSHHHPAVLNGQHPD | GATA-3 | 19 | 2172 | ESRNDKEMLQLQFKKIKANY | CAGE1 |
| | | | [6, 25] | | | | [398, 417] |
| 6 | 780 | DMVNELFDSLFPVIYTQLMN | Glypican-3 | 19 | 2173 | KIDGQSIESGSIEYDWNLTS | CALR3 |
| | | | [165, 184] | | | | [185, 204] |
| 6 | 781 | VLYRYGSFSVTLDIVQGIES | gp100 | 19 | 2174 | NQKSLFKDQKFEAMLVQQNR | CCDC62 |
| | | | [476, 495] | | | | [348, 367] |
| 6 | 782 | MSSTDKVIVFVSRKAVADHL | HAGE | 19 | 2175 | AHQEALMKLERLDSVPVEEQ | CDCA1 |
| | | | [484, 503] | | | | [158, 177] |
| 6 | 783 | ELLKYHQRVLYIDIDIHHGD | HDAC1 | 19 | 2176 | SENQKLQQKLKVMTELYQEN | CTAGE2 |
| | | | [162, 181]; | | | | [343, 362] |
| | | | HDAC2 | | | | |
| | | | [163, 182] | | | | |
| 6 | 784 | FKPIISKVMEMYQPSAVVLQ | HDAC2 | 19 | 2177 | MKLHRKLTVEENYRLEKEEK | cTAGE5 |
| | | | [242, 261] | | | | [394, 413] |
| 6 | 785 | QNSRQYLDQIRQTIFENLKM | HDAC3 | 19 | 2178 | SYASRDTYKLKRHMRTHSGE | CTCFL |
| | | | [349, 368] | | | | [376, 395] |
| 6 | 786 | GDLVDTQSDLIATQRDLIAT | HOM-TES-85 | 19 | 2179 | QVEVAIEALSANVPQPFEEN | CTNNA2 |
| | | | [236, 255] | | | | [588, 607] |
| 6 | 787 | TGTMPATNVSIFINNTQLSD | IGFS11 | 19 | 2180 | KSDARHNVSRVPVYAHITHK | DCAF12 |
| | | | [95, 114] | | | | [219, 238] |
| 6 | 788 | EIKVNPPQDFEIVDPGYLGY | IL13RA2 | 19 | 2181 | HTELHPRVAFWIIKLPRRRS | DKKL1 |
| | | | [29, 48] | | | | [160, 179] |
| 6 | 789 | IEEIPAYLPNGAALKDSVQR | JARID1B | 19 | 2182 | GTNFQKRLFTKIDTIAPDEI | EPHA2 |
| | | | [997, 1016] | | | | [131, 150] |
| 6 | 790 | LDKLNGFQLENFTLKVAYIP | KOC1 | 19 | 2183 | KESYPVVVAESMYGDFQEAM | FAM46D |
| | | | [136, 155] | | | | [196, 215] |
| 6 | 791 | KKNSYHFSAGFGSPIEDKSE | KU-CT-1 | 19 | 2184 | NPYNAVLTKKFQVTMRGLLS | FBXO39 |
| | | | [643, 662] | | | | [98, 117] |
| 6 | 792 | GARRPDSRLLQLHITMPFSS | Lage-1 | 19 | 2185 | AWQSKEEMENTKKFLSLTAV | FSIP1 |
| | | | [79, 98] | | | | [162, 181] |
| 6 | 793 | SILKNLRRVHPVSTMVKGLY | LDHC | 19 | 2186 | GAEVNTQDENGYTALTWAAR | GASZ |
| | | | [262, 281] | | | | [172, 191] |
| 6 | 794 | LSTEKSKKLKKWPEASTTKR | LEMD1 | 19 | 2187 | KVFGNFPKLIMTQVSKSLQV | Glypican-3 |
| | | | [80, 99] | | | | [206, 225] |
| 6 | 795 | SRGATTFIYNRAVKNTRKVA | LIPI | 19 | 2188 | FSVPQLPHSSSHWLRLPRIF | gp100 |
| | | | [135, 154] | | | | [625, 644] |
| 6 | 796 | ITKKVADLVGFLLLKYRARE | MAGE-A1 | 19 | 2189 | LKNITYLVLDEADKMLDMGF | HAGE |
| | | | [102, 121] | | | | [387, 406] |
| 6 | 797 | QDRIATTDDTTAMASASSSA | MAGE-A10 | 19 | 2190 | QTRVKLNFLDQIAKYWELQG | JARID1B |
| | | | [342, 361] | | | | [96, 115] |
| 6 | 798 | GSVIKNYEDYFPEIFREASV | MAGE-A11 | 19 | 2191 | HSVPKRQRIRKLQIRNIPPH | KOC1 |
| | | | [250, 269] | | | | [72, 91] |
| 6 | 799 | KASEYLQLVFGIEVVEVVRI | MAGE-A12 | 19 | 2192 | GSKDFFNNQGIPQLIQLLKS | KU-CT-1 |
| | | | [153, 172] | | | | [348, 367] |
| 6 | 800 | SKASEYLQLVFGIEVVEVVP | MAGE-A2 | 19 | 2193 | MSTVKEQLIEKLIEDDENSQ | LDHC |
| | | | [152, 171] | | | | [1, 20] |
| 6 | 801 | EEQEAASSSSTLVEVTLGEV | MAGE-A3 | 19 | 2194 | AKFVDVIHSDSNGLGIQEPL | LIPI |
| | | | [34, 53]; | | | | [224, 243] |
| | | | MAGE-A6 | | | | |
| | | | [34, 53] | | | | |
| 6 | 802 | ATEEQEAASSSSTLVEVTLG | MAGE-A6 | 19 | 2195 | HAEIRKMSLLKFLAKVNGSD | MAGE-A10 |
| | | | [32, 51] | | | | [303, 322] |
| 6 | 803 | VRVNARVRISYPSLHEEALG | MAGE-A8 | 19 | 2196 | VYAGREHELFGEPKELLTQN | MAGE-A11 |
| | | | [294, 313] | | | | [343, 362] |
| 6 | 804 | VGKEHMFYGEPRKLLTQDWV | MAGE-A9 | 19 | 2197 | KISGGPRISYPLLHEWALRE | MAGE-A6 |
| | | | [231, 250] | | | | [292, 311] |
| 6 | 805 | MHFILRKYKMREPIMKADML | MAGE-B1 | 19 | 2198 | RSSVRARRRTTATTFRARSR | MAGE-B1 |
| | | | [116, 135] | | | | [318, 337] |
| 6 | 806 | ESLLSSWDFPRRKLLMPLLG | MAGE-B2 | 19 | 2199 | VDLTDEESLLSSWDEPERKL | MAGE-B2 |
| | | | [190, 209] | | | | [184, 203] |
| 6 | 807 | VQFLMEMYKMKKPIMKADML | MAGE-B3 | 19 | 2200 | RGQTQDHQGAQITATNKKKV | MAGE-B3 |
| | | | [119, 138] | | | | [19, 38] |
| 6 | 808 | FPEIFRKVSQRTELVFGLAL | MAGE-B4 | 19 | 2201 | AEKEESPSSSSSVLRDTASS | MAGE-B4 |
| | | | [147, 166] | | | | [33, 52] |
| 6 | 809 | DSSGESYTLVSKLGLPSEGI | MAGE-B6 | 19 | 2202 | RTHSTFEGFPQSLLQIPMTS | MAGE-C1 |
| | | | [256, 275] | | | | [325, 344] |
| 6 | 810 | EFLAMLKNTVPITFPSSYKD | MAGE-C1 | 19 | 2203 | PMEDVNLSSGHIARVSVSGS | MORC1 |
| | | | [1086, 1105] | | | | [780, 799] |
| 6 | 811 | PRELLTKVWVQGHYLEYREV | MAGE-C2 | 19 | 2204 | ENNEGLRAFLLTIENELKNE | MPHOSPH1 |
| | | | [270, 289] | | | | [882, 901] |
| 6 | 812 | EKPLNSFQYQRRQAMGIPFI | MORC1 | 19 | 2205 | YQPDLKYLSFTLTKLSRDDI | NLRP4 |
| | | | [464, 483] | | | | [692, 711] |
| 6 | 813 | RAKRKLYTSEISSPIDISGQ | MPHOSPH1 | 19 | 2206 | TIPYGIKYDKAWLMNSIQSH | NXF2 |
| | | | [1775, 1794] | | | | [128, 147] |
| 6 | 814 | TSPQLSTGVSFFFLSFHISN | MUC-1 | 19 | 2207 | LQSKNMWLQQQLVHAHKKAD | NY-BR-1 |
| | | | [1032, 1051] | | | | [1270, 1289] |
| 6 | 815 | TETQVKIWFQNRRYKTKRKQ | NKX3.1 | 19 | 2208 | RGKAPDPQAGNFVLVFPFNE | NYD-TSPG |
| | | | [164, 183] | | | | [545, 564] |
| 6 | 816 | STTSVYSSFVFNLFTPEGAE | NLRP4 | 19 | 2209 | HKAEVEAIMEQLKELKQKGD | ODF2 |
| | | | [367, 386] | | | | [377, 396] |
| 6 | 817 | RSLDPQSYSLIHQLLSAEDL | NR6A1 | 19 | 2210 | HDAIQNQQNALELMMDHLQK | PASD1 |
| | | | [244, 263] | | | | [392, 411] |
| 6 | 818 | DNEWNYTRAGQAFTMLQTEG | NXF2 | 19 | 2211 | RSWTYGITRGGRVFFINEEA | PEPP2 |
| | | | [596, 615] | | | | [14, 33] |
| 6 | 819 | SSEIVGMLLQQNVDVFAADI | NY-BR-1 | 19 | 2212 | GLTDKMRNDFNVMKDLAVHT | PIWIL1 |
| | | | [161, 180] | | | | [391, 410] |
| 6 | 820 | DDMYIVQKYISNPLLIGRYK | NYD-TSPG | 19 | 2213 | ENYQPKMVVFVVQKKISTNL | PIWIL2 |
| | | | [234, 253] | | | | [841, 860] |
| 6 | 821 | ATSAQNIEFLQVIAKREEAI | ODF2 | 19 | 2214 | FRRTFKLLDFEQVGRNYYTK | PIWIL3 |
| | | | [675, 694] | | | | [229, 248] |
| 6 | 822 | PAAYRQTDVRVTKFKAPQYT | ODF3 | 19 | 2215 | SATEVGRIQASPLPRSVDLS | PIWIL4 |
| | | | [182, 201] | | | | [17, 36] |
| 6 | 823 | NIWIFELERNVSIPIGWSYF | ODF4 | 19 | 2216 | MPMQDIKMILKMVQLDSIED | PRAME |
| | | | [165, 184] | | | | [218, 237] |
| 6 | 824 | NNVVLEAPFLVGIEGSLKGS | OIP5 | 19 | 2217 | FLDELKAENIKKFLYNFTQI | PSMA |
| | | | [111, 130] | | | | [61, 80] |
| 6 | 825 | RADPVDLEFSVDQVDSVDQE | PASD1 | 19 | 2218 | TPAQKILTKFKQSRAMNFDF | RAGE-1 |
| | | | [298, 317] | | | | [220, 239] |
| 6 | 826 | FDDEAYYAALGTRPPINMEE | PBK | 19 | 2219 | NNSQPAPGNILSTAPPWLRH | SAGE1 |
| | | | [266, 285] | | | | [635, 654] |
| 6 | 827 | SQEIEMHADNPAAIQTVVLQ | PEPP2 | 19 | 2220 | ESDGDEYAMASSAESSPGEY | SART3 |
| | | | [674, 693] | | | | [64, 83] |
| 6 | 828 | IYTRRNYEAANSLIQNLFKV | PIWIL1 | 19 | 2221 | ELEDIKVSLQRSVSTQKALE | SCP-1 |
| | | | [499, 518] | | | | [323, 342] |
| 6 | 829 | AASIRRTDGGLFLLADVSHK | PIWIL2 | 19 | 2222 | SILQEQISHLQFVIHSQHQN | se57-1 |
| | | | [364, 383] | | | | [237, 256] |
| 6 | 830 | KKKAIQLYRHGTSLEIWLGY | PIWIL3 | 19 | 2223 | EKQPYYEEQARLSKIHLEKY | SOX-6 |
| | | | [248, 267] | | | | [666, 685] |
| 6 | 831 | SNKAKAFDGAILFLSQKLEE | PIWIL4 | 19 | 2224 | RALRKDKPAATAASFTAEEW | SPAG1 |
| | | | [151, 170] | | | | [73, 92] |
| 6 | 832 | QLTTLSFYGNSISISALQSL | PRAME | 19 | 2225 | GVDGQWDLSNYHLLDLGRPH | SPAG9 |
| | | | [407, 426] | | | | [1028, 1047] |
| 6 | 833 | EAEVGEFPWQVSIQARSEPF | PRSS55 | 19 | 2226 | PMGPEASFFDVLDRHRESLL | SPO11 |
| | | | [73, 92] | | | | [5, 24] |
| 6 | 834 | SFDSLFSAVKNFTEIASKFS | PSMA | 19 | 2227 | NEVKRLLRSDAEAVSTRWEV | TAF7L |
| | | | [628, 647] | | | | [263, 282] |
| 6 | 835 | KRRGPAYVMELPKLKLSGVV | RAGE-1 | 19 | 2228 | QTTFGPVFEDQPLSVLFPEE | TAG-1 |
| | | | [339, 358] | | | | [32, 51] |
| 6 | 836 | IRKTQKIVIKKREPLNFGIP | RCAS1 | 19 | 2229 | DYGNEEIIPLNRIYHLNRNI | TDRD1 |
| | | | [102, 121] | | | | [350, 369] |
| 6 | 837 | PAPDNVLLTLRPRRINMTDT | SAGE1 | 19 | 2230 | QTQLAKTLQEIFQAENTIML | TEKT5 |
| | | | [216, 235] | | | | [357, 376] |
| 6 | 838 | APRLAEYQAYIDFEMKIGDP | SART3 | 19 | 2231 | RITIGTLFSVLHERRSQFPV | TEX14 |
| | | | [307, 326] | | | | [328, 347] |
| 6 | 839 | HDLEIQLTAITTSEQYYSKE | SCP-1 | 19 | 2232 | REDNAVSAATALLESEEDTI | TEX15 |
| | | | [479, 498] | | | | [544, 563] |
| 6 | 840 | RLKTIKQLYEQFIKSMEELE | SCP3a | 19 | 2233 | SKPKAPATLLEEWDPVPKPK | THEG |
| | | | [171, 190] | | | | [272, 291] |
| 6 | 841 | NTREPAAEIEALLGMDLVRL | SCRN1 | 19 | 2234 | FTKEVNEWMAQDLENIVAIH | TPTE |
| | | | [96, 115] | | | | [318, 337] |
| 6 | 842 | EAGAAALRNVAQRLFENYQT | se57-1 | 19 | 2235 | ISMQNLEALLVANRDKEYQS | TSGA10 |
| | | | [121, 140] | | | | [562, 581] |
| 6 | 843 | DFQKEYQLKTIEKLALEKSY | SLCO6A1 | 19 | 2236 | VNITEYRASHSTPIEWYPDY | TSPY1 |
| | | | [132, 151] | | | | [222, 241] |
| 6 | 844 | AAQLASMQVSPGAKMPSTPQ | SOX-6 | 19 | 2237 | NFSFRNTLEGFASPLTGIAD | TYR |
| | | | [371, 390] | | | | [337, 356] |
| 6 | 845 | SNTHYRIPQGFGNLLEGLTR | SP17 | 19 | 2238 | GTDEAVLQVQAHEHGQEIFQ | ZNF165 |
| | | | [6, 25] | | | | [130, 149] |
| 6 | 846 | TPNNHFTLEDIQALKRQYEL | SPAG1 | 20 | 2239 | AALLAGRALQGLRRLELASN | 5T4 |
| | | | [907, 926] | | | | [201, 220] |
| 6 | 847 | STAHSRIRKERPISLGIFPL | SPAG9 | 20 | 2240 | ILSSLELWIDENKIATTGEA | ADAM2 |
| | | | [190, 209] | | | | [224, 243] |
| 6 | 848 | HLSKSDLLANQSQEVLEERT | SPATA19 | 20 | 2241 | RDFNQFSSGEKNIFLASFVH | AFP |
| | | | [93, 112] | | | | [337, 356] |
| 6 | 849 | RSSWENIKFEDSVGLQMVSH | SPO11 | 20 | 2242 | AREGGRFFPRERKRFRGQER | AKAP-3 |
| | | | [75, 94] | | | | [254, 273] |
| 6 | 850 | GKHAWTHRLRERKQLVIYEE | SSX-1 | 20 | 2243 | GGGQSAKALSVKQLESHRAP | AKAP-4 |
| | | | [160, 179] | | | | [588, 607] |
| 6 | 851 | GFKAILPSFMANKRVTDFQG | SSX-3 | 20 | 2244 | IQNKPLYFADRLYDSMKGKG | ANXA2 |
| | | | [62, 81] | | | | [263, 282] |
| 6 | 852 | ISEKLRKAFDDIAKYFSKKE | SSX-4 | 20 | 2245 | YLQKVVLKDLWKHSFSWPFQ | BRDT |
| | | | [17, 36] | | | | [34, 53] |
| 6 | 853 | HRVRERKQLVIYEEISDPQE | SSX-5 | 20 | 2246 | TEKPEFQSQVYNYAKDNNIK | CAGE1 |
| | | | [166, 185] | | | | [138, 157] |
| 6 | 854 | MGQHKDLWDFHMPERLAKEI | SYCE1 | 20 | 2247 | QMVTDLELSTLLPISHENLT | CCDC62 |
| | | | [166, 185] | | | | [643, 662] |
| 6 | 855 | DADSSAQAAAQAPENFQEGK | TAF7L | 20 | 2248 | PKAKRTSRFLSGIINFIHFR | CDCA1 |
| | | | [66, 85] | | | | [112, 131] |
| 6 | 856 | AAVALVSSSAWSSALGSQTT | TAG-1 | 20 | 2249 | KLLEKFSLVQKEYEGYEVES | CTAGE2 |
| | | | [15, 34] | | | | [61, 80] |
| 6 | 857 | IMLLKNFMLNQNVMLSVKGI | TDRD1 | 20 | 2250 | RAVVAALPEGMRPDSNLYGF | cTAGE5 |
| | | | [1072, 1091] | | | | [20, 39] |
| 6 | 858 | LVNEVFTIDDTLQTLKLRLR | TEKT5 | 20 | 2251 | EQFTKIKELELMPEKGLKEE | CTCFL |
| | | | [415, 434] | | | | [11, 30] |
| 6 | 859 | LLQISDALRYLHFQGFIHRS | TEX14 | 20 | 2252 | PQVINAALTLAARPQSKVAQ | CTNNA2 |
| | | | [357, 376] | | | | [460, 479] |
| 6 | 860 | KDLRRHKIYGRKRRLTSQDS | TEX15 | 20 | 2253 | VGSQAHVSFLDPRQPSYNVK | DCAF12 |
| | | | [933, 952] | | | | [313, 332] |
| 6 | 861 | EDIPEISRLSISQKLPSTTM | THEG | 20 | 2254 | GERPYWELSNHEVMKAINDG | EPHA2 |
| | | | [97, 116] | | | | [814, 833] |
| 6 | 862 | ERRQQYFSDLFNILDTAIIV | TPTE | 20 | 2255 | LIGQGIIVKDARLNGSVASY | FAM46D |
| | | | [148, 167] | | | | [51, 70] |
| 6 | 863 | SEIELLASQMANERISMQNL | TSGA10 | 20 | 2256 | ELDRLVWRNSIRSSFISSLS | FBXO39 |
| | | | [548, 567] | | | | [135, 154] |
| 6 | 864 | SDVPVLQVIMHSRYRAQRFW | TSP50 | 20 | 2257 | FLDDPLYGISVSLSSEDQHL | FSIP1 |
| | | | [179, 198] | | | | [537, 556] |
| 6 | 865 | DRRGAVIQSVPGFWANVIAN | TSPY1 | 20 | 2258 | LDRGANASFEKDKQSILITA | GASZ |
| | | | [146, 165] | | | | [99, 118] |
| 6 | 866 | EKDKFFAYLTLAKHTISSDY | TYR | 20 | 2259 | YRIYDMENVLLGLFSTIHDS | Glypican-3 |
| | | | [130, 149] | | | | [311, 330] |
| 6 | 867 | TGSQALLLRTPYSSDNLYQM | WT1 | 20 | 2260 | HRRGSRSYVPLAHSSSAFTI | gp100 |
| | | | [210, 229] | | | | [190, 209] |
| 6 | 868 | GKAFRHSSKLARHQRIHTGE | ZNF165 | 20 | 2261 | MGFEPQIMKILLDVRPDRQT | HAGE |
| | | | [350, 369] | | | | [404, 423] |
| 7 | 869 | FSGSNASVSAPSPLVELILN | 5T4 | 20 | 2262 | KPPLEKILPLLASLQRIRVR | JARID1B |
| | | | [162, 181] | | | | [1226, 1245] |
| 7 | 870 | SQPVSILSPNTLKEIEASAE | ACRBP | 20 | 2263 | DAKVRMVIITGPPEAQFKAQ | KOC1 |
| | | | [124, 143] | | | | [448, 467] |
| 7 | 871 | IERGRILNWEGVQYLWSFVL | ACTL8 | 20 | 2264 | RAKLQELNAIPPILDLLKSE | KU-CT-1 |
| | | | [67, 86] | | | | [184, 203] |
| 7 | 872 | QDFAKYIEMHVIVEKQLYNH | ADAM2 | 20 | 2265 | MIEEPRLYEKNKPFYKLQEV | LIPI |
| | | | [174, 193] | | | | [386, 405] |
| 7 | 873 | SKHLPVFTYTDQGAILEDQP | ADAM29 | 20 | 2266 | FPTVRPADLTRVIMPLEQRS | MAGE-A11 |
| | | | [75, 94] | | | | [98, 117] |
| 7 | 874 | YKEVSKMVKDALTAIEKPTG | AFP | 20 | 2267 | REKRRKAREETQGLKVAHAT | MAGE-B1 |
| | | | [60, 79] | | | | [12, 31] |
| 7 | 875 | KQLQAVLQWVAASELNVPIL | AKAP-3 | 20 | 2268 | WGPRAYAETSKMKVLEFLAK | MAGE-B2 |
| | | | [771, 790] | | | | [275, 294] |
| 7 | 876 | KQLQAVLQWIAASQFNVPML | AKAP-4 | 20 | 2269 | ATEEKIWEFLNKMRIYDGKK | MAGE-B3 |
| | | | [772, 791] | | | | [218, 237] |
| 7 | 877 | PKWISIMTERSVPHLQKVFD | ANXA2 | 20 | 2270 | STSTERSLKDSLTRKTKMLV | MAGE-B4 |
| | | | [211, 230] | | | | [98, 117] |
| 7 | 878 | LKAVHQQLQVLSQVPFRKLN | BRDT | 20 | 2271 | EVIKRKVVEFLAMLKNTVPI | MAGE-C1 |
| | | | [430, 449] | | | | [1078, 1097] |
| 7 | 879 | TMYRGNTTMDIKDLVKQFHQ | CABYR | 20 | 2272 | RKLQSIIYDSNTRGIHNEIS | MORC1 |
| | | | [45, 64] | | | | [883, 902] |
| 7 | 880 | EKVSDIMLQKLKSLHLKKKT | CAGE1 | 20 | 2273 | LDVQIQHVVEGKRALSELTQ | MPHOSPH1 |
| | | | [645, 664] | | | | [1135, 1154] |
| 7 | 881 | DSRFGHFRLSSGKFYGHKEK | CALR3 | 20 | 2274 | RTGYTKTYQAHAKQKFSRLW | NLRP4 |
| | | | [43, 62] | | | | [92, 111] |
| 7 | 882 | SRQMVTDLELSTLLPISHEN | CCDC62 | 20 | 2275 | KYFEDSRNMKTLKDPYLKGE | NXF2 |
| | | | [641, 660] | | | | [439, 458] |
| 7 | 883 | KSSADKMQQLNAAHQEALMK | CDCA1 | 20 | 2276 | AFEPAIEMQKSVPNKALELK | NY-BR-1 |
| | | | [146, 165] | | | | [704, 723] |
| 7 | 884 | PASNMLKMEWSREVTTNAQR | CRISP2 | 20 | 2277 | GLNVKRIIQELQKLMNKQHS | NYD-TSPG |
| | | | [54, 73] | | | | [573, 592] |
| 7 | 885 | SQIDDFTGFSKDRMMQKPGS | CT45 | 20 | 2278 | ANVFGDGPYSTFLTSSPIRS | ODF2 |
| | | | [71, 90] | | | | [805, 824] |
| 7 | 886 | KKASILLIRKIYILMQNLGP | CT46 | 20 | 2279 | KLNWIPSFPTYDYFNQVTLQ | PASD1 |
| | | | [147, 166] | | | | [20, 39] |
| 7 | 887 | DSGPDSSDVVPAAEVVGVAG | CT47 | 20 | 2280 | LPRNMPSHRAQIMARYPEGY | PEPP2 |
| | | | [37, 56] | | | | [439, 458] |
| 7 | 888 | LEGERNQIYIQLSEVDKTKE | CTAGE2 | 20 | 2281 | HAFDGTILFLPKRLQQKVTE | PIWIL1 |
| | | | [299, 318] | | | | [161, 180] |
| 7 | 889 | LLEKDPYALDVPNTAFGREH | cTAGE5 | 20 | 2282 | IEGRVLPMERINLKNTSFIT | PIWIL2 |
| | | | [497, 516] | | | | [563, 582] |
| 7 | 890 | MSGDERSDEIVLTVSNSNVE | CTCFL | 20 | 2283 | KDYSIVKELAKHTRLSPRRR | PIWIL3 |
| | | | [206, 225] | | | | [413, 432] |
| 7 | 891 | FGKEMVKLNYVAARRQQELK | CTNNA2 | 20 | 2284 | ILKKLSMYQIGRNFYNPSEP | PIWIL4 |
| | | | [179, 198] | | | | [213, 232] |
| 7 | 892 | GYVPQVDDIVNVVMVESIQF | CXorf48 | 20 | 2285 | PLQALLERASATLQDLVFDE | PRAME |
| | | | [208, 227] | | | | [368, 387] |
| 7 | 893 | SMVENKLVELEHTLLSKGFR | CXorf61 | 20 | 2286 | DSVELAHYDVLLSYPNKTHP | PSMA |
| | | | [85, 104] | | | | [106, 125] |
| 7 | 894 | VLGTVKWFNVRNGYGFINRN | DBPC | 20 | 2287 | DERIAAHQALQHPYFQEQRK | RAGE-1 |
| | | | [94, 113] | | | | [271, 290] |
| 7 | 895 | HKDWIFSIAWISDTMAVSGS | DCAF12 | 20 | 2288 | QPQPDNILSTASTGLINVAG | SAGE1 |
| | | | [183, 202] | | | | [262, 281] |
| 7 | 896 | VAFWIIKLPRRRSHQDALEG | DKKL1 | 20 | 2289 | EYENESQASQAVMKMDGMTI | SART3 |
| | | | [167, 186] | | | | [847, 866] |
| 7 | 897 | SSQYRMHSYYPPPSYLGQSV | DMRT1 | 20 | 2290 | PSSLTTPGSTLKFGAIRKMR | SCP-1 |
| | | | [285, 304] | | | | [933, 952] |
| 7 | 898 | QQLGLSTNGKKIEVYLRLHR | DPPA2 | 20 | 2291 | EKLEEKHSQITELENLVQRM | se57-1 |
| | | | [105, 124] | | | | [179, 198] |
| 7 | 899 | VDEKAPEFSMQGLKAGVIAV | EpCAM | 20 | 2292 | KDERRKILQAFPDMHNSNIS | SOX-6 |
| | | | [252, 271] | | | | [633, 652] |
| 7 | 900 | KETFNLYYAESDLDYGTNFQ | EPHA2 | 20 | 2293 | ETLEQYGKAYVDYKTVLQID | SPAG1 |
| | | | [116, 135] | | | | [532, 551] |
| 7 | 901 | NLTWDQVITLDQVLDEVIPI | FAM46D | 20 | 2294 | REAELKKEYNALHQRHTEMI | SPAG9 |
| | | | [8, 27] | | | | [148, 167] |
| 7 | 902 | TRPKKMGSQLPKPRMLRESG | FATE1 | 20 | 2295 | IYYTDSQLFGNQTVVDNIIN | SPO11 |
| | | | [73, 92] | | | | [136, 155] |
| 7 | 903 | RKWNQMMYSAELWRYRTITF | FBXO39 | 20 | 2296 | DGTKEIESQGSIPGFLISSG | TAF7L |
| | | | [44, 63] | | | | [286, 305] |
| 7 | 904 | RSLFWRSEPADDLQRQDNRV | FMR1NB | 20 | 2297 | DIGDTTIQLSWSRGFDNHSP | TAG-1 |
| | | | [205, 224] | | | | [618, 637] |
| 7 | 905 | AIQKMKKLDKILAKKQRREK | FSIP1 | 20 | 2298 | VDVADKLVTFGLAKNITPQR | TDRD1 |
| | | | [118, 137] | | | | [1109, 1128] |
| 7 | 906 | LSDDKMEHAQKLMRLQNLRG | FTHL17 | 20 | 2299 | LYHREKRIGIDLVHDNVEKN | TEKT5 |
| | | | [59, 78] | | | | [194, 213] |
| 7 | 907 | MAASALRGLPVAGGGESSES | GASZ | 20 | 2300 | SVSTPLSPGSVSSAASQYKD | TEX14 |
| | | | [1, 20] | | | | [1209, 1228] |
| 7 | 908 | GLYHKMNGQNRPLIKPKRAL | GATA-3 | 20 | 2301 | HSNLLYSQYFTYFAGEPQAN | TEX15 |
| | | | [289, 308] | | | | [2705, 2724] |
| 7 | 909 | VLLGLFSTIHDSIQYVQKNA | Glypican-3 | 20 | 2302 | YVTERIIAMSFPSSGRQSFY | TPTE |
| | | | [319, 338] | | | | [241, 260] |
| 7 | 910 | SQKRSFVYVWKTWGQYWQVL | gp100 | 20 | 2303 | LAMKEKTISGMKNIIAEMEQ | TSGA10 |
| | | | [144, 163] | | | | [291, 310] |
| 7 | 911 | PKASTWVVASRRSSTVSRAP | HAGE | 20 | 2304 | EAYRRRHHNSSLNFFNWFSD | TSPY1 |
| | | | [8, 27] | | | | [244, 263] |
| 7 | 912 | TKYHSDDYIKFLASIRPDNM | HDAC1 | 20 | 2305 | ASQSSMHNALHIYMNGTMSQ | TYR |
| | | | [65, 84] | | | | [357, 376] |
| 7 | 913 | EMTKYHSDEYIKFLASIRPD | HDAC2 | 20 | 2306 | PGPALNVKLQPVETKAHFDS | ZNF165 |
| | | | [64, 83] | | | | [155, 174] |
| 7 | 914 | SEELPYSEYFEYFAPDFTLH | HDAC3 | 21 | 2307 | VSLTYVSFRNLTHLESLHLE | 5T4 |
| | | | [320, 339] | | | | [247, 266] |
| 7 | 915 | PSQKPSGFKSGQHPLNGQPL | HOM-TES-85 | 21 | 2308 | QSVEPQQDFAKYIEMHVIVE | ADAM2 |
| | | | [92, 111] | | | | [168, 187] |
| 7 | 916 | IALILGAFFYWRSKNKEEEE | IGFS11 | 21 | 2309 | TKVNFTEIQKLVLDVAHVHE | AFP |
| | | | [258, 277] | | | | [248, 267] |
| 7 | 917 | IREDDTTLVTATVENETYTL | IL13RA2 | 21 | 2310 | KGTGSAEAVLQNAYQAIHNE | AKAP-3 |
| | | | [276, 295] | | | | [721, 740] |
| 7 | 918 | ESYNEWALNVNEALEAKINK | JARID1B | 21 | 2311 | GMKQANGQFIDKLVESVMKL | AKAP-4 |
| | | | [753, 772] | | | | [688, 707] |
| 7 | 919 | QDTDTKITISPLQELTLYNP | KOC1 | 21 | 2312 | KSYSPYDMLESIRKEVKGDL | ANXA2 |
| | | | [304, 323] | | | | [233, 252] |
| 7 | 920 | VIDLMFHPGGLMKLRSREAD | KU-CT-1 | 21 | 2313 | AQALEKLFMQKLSQMPQEEQ | BRDT |
| | | | [848, 867] | | | | [119, 138] |
| 7 | 921 | REGAGRMRVVGWGLGSASPE | Lage-1 | 21 | 2314 | QLKKELEKATASALDLLKRE | CAGE1 |
| | | | [142, 161] | | | | [457, 476] |
| 7 | 922 | QSAYEIIKLKGYTSWAIGLS | LDHC | 21 | 2315 | VGQLQAREQALTTMIKLKDK | CCDC62 |
| | | | [236, 255] | | | | [149, 168] |
| 7 | 923 | LGFSPGPILPSTRKLYEKKL | LEMD1 | 21 | 2316 | IQESLKTKIVDSPEKLKNYK | CDCA1 |
| | | | [19, 38] | | | | [236, 255] |
| 7 | 924 | DLFIPRIETILMMYTRNNLN | LIPI | 21 | 2317 | KSLKSQVAEAKMTFKRFQAN | CTAGE2 |
| | | | [56, 75] | | | | [151, 170] |
| 7 | 925 | VQAATSSSSPLVLGTLEEVP | MAGE-A1 | 21 | 2318 | ISHEKKAHDNWLAARNAERN | cTAGE5 |
| | | | [28, 47] | | | | [454, 473] |
| 7 | 926 | KLLTQDWVQENYLEYRQVPG | MAGE-A10 | 21 | 2319 | SPQEMEVLQFHALEENVMVA | CTCFL |
| | | | [269, 288]; | | | | [144, 163] |
| | | | MAGE-A4 | | | | |
| | | | [245, 264] | | | | |
| 7 | 927 | VKGLITKAEMLGSVIKNYED | MAGE-A11 | 21 | 2320 | TGIGELAAALNEFDNKIILD | CTNNA2 |
| | | | [239, 258] | | | | [271, 290] |
| 7 | 928 | ETSFQVALSRKMAELVHFLL | MAGE-A12 | 21 | 2321 | VGTGQGSLLFYDIRAQRFLE | DCAF12 |
| | | | [102, 121] | | | | [355, 374] |
| 7 | 929 | FAHPRKLLMQDLVQENYLEY | MAGE-A2 | 21 | 2322 | RLEGVISKYKPMMIITEYME | EPHA2 |
| | | | [239, 258] | | | | [677, 696] |
| 7 | 930 | APEEKIWEELSVLEVFEGRE | MAGE-A3 | 21 | 2323 | NNRLKSLSIQYLELDRLVWR | FBXO39 |
| | | | [216, 235]; | | | | [123, 142] |
| | | | MAGE-A6 | | | | |
| | | | [216, 235] | | | | |
| 7 | 931 | PVIFGKASESLKMIFGIDVK | MAGE-A4 | 21 | 2324 | EASKGYYLTKALTGHNMSEA | FSIP1 |
| | | | [149, 168] | | | | [477, 496] |
| 7 | 932 | GGPRISYPLLHEWALREGEE | MAGE-A6 | 21 | 2325 | VSLVQELLDSGISVDSNFQY | GASZ |
| | | | [295, 314] | | | | [59, 78] |
| 7 | 933 | LRKLLTQEWVQENYLEYRQA | MAGE-A8 | 21 | 2326 | TLSSRRRELIQKLKSFISFY | Glypican- |
| | | | [245, 264] | | | | 3 |
| | | | | | | | [383, 402] |
| 7 | 934 | KLKVAELVHFLLAKYRVKEP | MAGE-A9 | 21 | 2327 | GVSRQLRTKAWNRQLYPEWT | gp100 |
| | | | [109, 128] | | | | [34, 53] |
| 7 | 935 | EERAQVASSVRARRATTATT | MAGE-B1 | 21 | 2328 | PPIKKNFYKESTATSAMSKV | HAGE |
| | | | [312, 331] | | | | [192, 211] |
| 7 | 936 | QRAPTTAAAAAAGVSSTKSK | MAGE-B2 | 21 | 2329 | WEEFADPFAFIHKIRPIAEQ | JARID1B |
| | | | [63, 82] | | | | [39, 58] |
| 7 | 937 | IEKKQSFSQGLSSTVQSRTD | MAGE-B3 | 21 | 2330 | GKTVNELQNLSSAEVVVPRD | KOC1 |
| | | | [90, 109] | | | | [507, 526] |
| 7 | 938 | NQSSAWTLPRNGLLMPLLSV | MAGE-B4 | 21 | 2331 | YSQTGYLSSSNIINDGFYDY | KU-CT-1 |
| | | | [188, 207] | | | | [556, 575] |
| 7 | 939 | IYDGILHSIYGDARKIITED | MAGE-B6 | 21 | 2332 | LSVHIKNLLKHGASLDNFHF | LIPI |
| | | | [316, 335] | | | | [157, 176] |
| 7 | 940 | SLLQIPMTSSFSSTLLSIFQ | MAGE-C1 | 21 | 2333 | AQALQAEEQEAAFFSSTLNV | MAGE-A11 |
| | | | [336, 355] | | | | [138, 157] |
| 7 | 941 | MIVIKYKDYFPVILKRAREF | MAGE-C2 | 21 | 2334 | LKGNSATEEEIWKFMNVLGA | MAGE-B1 |
| | | | [169, 188] | | | | [210, 229] |
| 7 | 942 | EEESLSEVVVPMPSWLIRTR | MORC1 | 21 | 2335 | LITKDLVQEKYLEYKQVPSS | MAGE-B2 |
| | | | [135, 154] | | | | [247, 266] |
| 7 | 943 | QKFGDFLQHSPSILQSKAKK | MPHOSPH1 | 21 | 2336 | FPEILKKASFNMEVVFGVDL | MAGE-B3 |
| | | | [1731, 1750] | | | | [149, 168] |
| 7 | 944 | TSASGSASGSASTLVHNGTS | MUC-1 | 21 | 2337 | DPPRYQFLWGPRAHAETSKM | MAGE-B4 |
| | | | [959, 978] | | | | [264, 283] |
| 7 | 945 | PTPSKPLTSFLIQDILRDGA | NKX3.1 | 21 | 2338 | DELARFLLLKYQVKQPITKA | MAGE-C1 |
| | | | [20, 39] | | | | [913, 932] |
| 7 | 946 | MMAWSDNKIFRDRFLYTFYF | NLRP4 | 21 | 2339 | PEEASDIIYFGRSKKRLSTL | MORC1 |
| | | | [169, 188] | | | | [74, 93] |
| 7 | 947 | RLADELLFRQIAWIKKLPFF | NR6A1 | 21 | 2340 | DSDDTLYGSLTNSLNISEFE | MPHOSPH1 |
| | | | [289, 308] | | | | [231, 250] |
| 7 | 948 | FPKLLRLDGRELSAPVIVDI | NXF2 | 21 | 2341 | MEKRPVQVLLSSLLRKKMLP | NLRP4 |
| | | | [350, 369] | | | | [252, 271] |
| 7 | 949 | PKKPSAFKPAIEMQNSVPNK | NY-BR-1 | 21 | 2342 | KWHSEDEIRITTWANRKPPE | NXF2 |
| | | | [461, 480] | | | | [90, 109] |
| 7 | 950 | PNDYTKFVAEYFQERQMLGT | NYD-TSPG | 21 | 2343 | QIVEFLLIKNANANAVNKYK | NY-BR-1 |
| | | | [185, 204] | | | | [130, 149] |
| 7 | 951 | KLVEAEMDGAAAAKQVMALK | ODF2 | 21 | 2344 | TEKFDLSNLQNNYAHLTNSS | NYD-TSPG |
| | | | [210, 229] | | | | [282, 301] |
| 7 | 952 | MGPNTVGKASQPSFSIKGRS | ODF3 | 21 | 2345 | VAEALSTLESWRSRYNQVVK | ODF2 |
| | | | [148, 167] | | | | [434, 453] |
| 7 | 953 | AFILLLVVAFSKKWLDLSRS | ODF4 | 21 | 2346 | RLWQELSDSLGPVVQVNTWS | PASD1 |
| | | | [91, 110] | | | | [691, 710] |
| 7 | 954 | LKEKIVLTANRLKSLMKILS | OIP5 | 21 | 2347 | PKTMVNISDQTMHSIPTSPS | PEPP2 |
| | | | [199, 218] | | | | [527, 546] |
| 7 | 955 | EQLEERTWLLHDAIQNQQNA | PASD1 | 21 | 2348 | YHDMTAGRRSIAGFVASINE | PIWIL1 |
| | | | [382, 401] | | | | [634, 653] |
| 7 | 956 | NMARGLKYLHQEKKLLHGDI | PBK | 21 | 2349 | KTPKDSFTMSDGKEITFLEY | PIWIL2 |
| | | | [149, 168] | | | | [436, 455] |
| 7 | 957 | DLNLEWISLPRSWTYGITRG | PEPP2 | 21 | 2350 | LLQLWDLKFDTNFLSVPGRV | PIWIL3 |
| | | | [4, 23] | | | | [452, 471] |
| 7 | 958 | YNPLMEARRLASALLFQHED | PIWIL1 | 21 | 2351 | ETQRGETIKMTITLKRELPS | PIWIL4 |
| | | | [136, 155] | | | | [178, 197] |
| 7 | 959 | LVGNIVITRYNNRTYRIDDV | PIWIL2 | 21 | 2352 | MLTDVSPEPLQALLERASAT | PRAME |
| | | | [413, 432] | | | | [360, 379] |
| 7 | 960 | GSEGTVVQLLANHFRVISRP | PIWIL3 | 21 | 2353 | TLRGAVEPDRYVILGGHRDS | PSMA |
| | | | [119, 138] | | | | [361, 380] |
| 7 | 961 | QYAHKLTFLVAQSIHKEPSL | PIWIL4 | 21 | 2354 | LQSVLGSGTNGRVPVLRPLK | RAGE-1 |
| | | | [824, 843] | | | | [368, 387] |
| 7 | 962 | ETFKAVLDGLDVLLAQEVRP | PRAME | 21 | 2355 | RSTRDLYATVIHDIQEEEME | SAGE1 |
| | | | [95, 114] | | | | [710, 729] |
| 7 | 963 | FEGRTRYSRITGGMEAEVGE | PRSS55 | 21 | 2356 | DGMTIKENIIKVAISNPPQR | SART3 |
| | | | [59, 78] | | | | [862, 881] |
| 7 | 964 | KYADKIYSISMKHPQEMKTY | PSMA | 21 | 2357 | DSSETTDLLSMVSEEETLKT | SCP-1 |
| | | | [606, 625] | | | | [893, 912] |
| 7 | 965 | YDPDERIAAHQALQHPYFQE | RAGE-1 | 21 | 2358 | KLSLENKLLQLKSSATYGKS | se57-1 |
| | | | [268, 287] | | | | [209, 228] |
| 7 | 966 | ISSTITRDLYVTATHSVHEE | SAGE1 | 21 | 2359 | NEKERTRFENLGPQLTGKSN | SOX-6 |
| | | | [660, 679] | | | | [539, 558] |
| 7 | 967 | EKVHSLFRRQLAIPLYDMEA | SART3 | 21 | 2360 | PASVPLQAWHPAKEMISKQA | SPAG1 |
| | | | [245, 264] | | | | [587, 606] |
| 7 | 968 | EQEQSSLRASLEIELSNLKA | SCP-1 | 21 | 2361 | SIRLDSTLRLYHAHTYQHLQ | SPAG9 |
| | | | [739, 758] | | | | [1105, 1124] |
| 7 | 969 | NLLTGAQNEFKKEMAMLQKK | SCP3a | 21 | 2362 | KGVPDLNTRLLVKKLWDTFH | SPO11 |
| | | | [195, 214] | | | | [250, 269] |
| 7 | 970 | DQEQGRKLRSTMLELEKQGL | SCRN1 | 21 | 2363 | PDVKEMEKSSFTEYIESPDV | TAF7L |
| | | | [361, 380] | | | | [242, 261] |
| 7 | 971 | ERKLSLENKLLQLKSSATYG | se57-1 | 21 | 2364 | VFSKFAQLNLAAEDTRLFAP | TAG-1 |
| | | | [207, 226] | | | | [220, 239] |
| 7 | 972 | DRKKVIWFVASSFLIGLGSL | SLCO6A1 | 21 | 2365 | ESVLVGYVDYGNFEILSLMR | TDRD1 |
| | | | [167, 186] | | | | [570, 589] |
| 7 | 973 | EDAEGSKAMNGSAAKLQQYY | SOX-6 | 21 | 2366 | IDDTLQTLKLRLRETQDTLQ | TEKT5 |
| | | | [574, 593] | | | | [422, 441] |
| 7 | 974 | SIPFSNTHYRIPQGFGNLLE | SP17 | 21 | 2367 | PEHSEAFQASSDTLVAVEKS | TEX14 |
| | | | [2, 21] | | | | [1042, 1061] |
| 7 | 975 | EPAGSEIADDLSILYSNRAA | SPAG1 | 21 | 2368 | NPETDVSLVPDASVLSKPIF | TEX15 |
| | | | [476, 495] | | | | [2497, 2516] |
| 7 | 976 | DEEVVKELMPLVVAVLENLD | SPAG9 | 21 | 2369 | ILADLIFTDSKLYIPLEYRS | TPTE |
| | | | [43, 62] | | | | [109, 128] |
| 7 | 977 | EMTEDIMRDRIEQVRRSISR | SPATA19 | 21 | 2370 | VANRDKEYQSQIALQEKESE | TSGA10 |
| | | | [130, 149] | | | | [572, 591] |
| 7 | 978 | PTGGSRLASSSEVLASIENI | SPO11 | 21 | 2371 | SANDPIFLLHHAFVDSIFEQ | TYR |
| | | | [35, 54] | | | | [380, 399] |
| 7 | 979 | EKRSKAFDDIATYFSKKEWK | SSX-1 | 22 | 2372 | NRNLTEVPTDLPAYVRNLFL | 5T4 |
| | | | [19, 38] | | | | [79, 98] |
| 7 | 980 | MNGDDAFARRPTVGAQIPEK | SSX-2 | 22 | 2373 | LVLRPHDVAFLLVYREKSNY | ADAM2 |
| | | | [1, 20] | | | | [258, 277] |
| 7 | 981 | MNGDDTFARRPTVGAQIPEK | SSX-3 | 22 | 2374 | FQKLGEYYLQNAFLVAYTKK | AFP |
| | | | [1, 20] | | | | [419, 438] |
| 7 | 982 | VTLPPFMRSKRAADFHGNDF | SSX-4 | 22 | 2375 | SDSWAEDLIVSALLLIQYHL | AKAP-3 |
| | | | [65, 84] | | | | [520, 539] |
| 7 | 983 | KYFSEKEWEKMKASEKIIYV | SSX-5 | 22 | 2376 | MVYANQVASDMMVSLMKTLK | AKAP-4 |
| | | | [30, 49] | | | | [334, 353] |
| 7 | 984 | VHLKEILSKKQETLRILRLH | SYCE1 | 22 | 2377 | RIMVSRSEVDMLKIRSEFKR | ANXA2 |
| | | | [96, 115] | | | | [290, 309] |
| 7 | 985 | NEGTSSIVMEIQKQIEKKEK | TAF7L | 22 | 2378 | DVFETHFSKIPIEPVESMPL | BRDT |
| | | | [384, 403] | | | | [367, 386] |
| 7 | 986 | VSREAILRFGFLQEFSKEER | TAG-1 | 22 | 2379 | QVFIDVINKLKENVEELIED | CAGE1 |
| | | | [121, 140] | | | | [348, 367] |
| 7 | 987 | LGVTKEIAIWAERIMFSDLR | TDRD1 | 22 | 2380 | IYVKQQSDLQFLNFNVENSQ | CCDC62 |
| | | | [237, 256] | | | | [288, 307] |
| 7 | 988 | TILPTLRSALFSRYSPHDWD | TEKT5 | 22 | 2381 | KMKDTVQKLKNARQEVVEKY | CDCA1 |
| | | | [76, 95] | | | | [257, 276] |
| 7 | 989 | PPSLNYIPPVLQLSGGQKPD | TEX14 | 22 | 2382 | ILHEKKAHDNWSAAWTAERN | CTAGE2 |
| | | | [796, 815] | | | | [423, 442] |
| 7 | 990 | YGLEHIFFDAAKNLVWKERT | TEX15 | 22 | 2383 | LTETELKFELLEKDPYALDV | cTAGE5 |
| | | | [1882, 1901] | | | | [488, 507] |
| 7 | 991 | RPKRFYLEYYNNNRTTPVWP | THEG | 22 | 2384 | KYASVEASKLKRHVRSHTGE | CTCFL |
| | | | [199, 218] | | | | [348, 367] |
| 7 | 992 | IALFFLMDVLLRVFVERRQQ | TPTE | 22 | 2385 | SNNEEGVKLVRMAATQIDSL | CTNNA2 |
| | | | [133, 152] | | | | [439, 458] |
| 7 | 993 | RRQLDETNDELAQIARERDI | TSGA10 | 22 | 2386 | RHNVSRVPVYAHITHKALKD | DCAF12 |
| | | | [330, 349] | | | | [223, 242] |
| 7 | 994 | KSEAPPIYLQVSSYQHWIWD | TSP50 | 22 | 2387 | QSPEDVYFSKSEQLKPLKTY | EPHA2 |
| | | | [336, 355] | | | | [569, 588] |
| 7 | 995 | HHNSSLNFFNWFSDHNFAGS | TSPY1 | 22 | 2388 | QFKKTMSTFHNLVSLNLNYN | FBXO39 |
| | | | [250, 269] | | | | [215, 234] |
| 7 | 996 | KHTISSDYVIPIGTYGQMKN | TYR | 22 | 2389 | LREIDEKLKMMKENVLESTS | FSIP1 |
| | | | [142, 161] | | | | [382, 401] |
| 7 | 997 | IQDVARVPGVAPTLVASASE | WT1 | 22 | 2390 | LITAVQNVITELPVNSQKIT | GASZ |
| | | | [297, 316] | | | | [370, 389] |
| 7 | 998 | FKWNSDFINHQIIYAGEKNH | ZNF165 | 22 | 2391 | IHDSIQYVQKNAGKLTTTIG | Glypican- |
| | | | [301, 320] | | | | 3 |
| | | | | | | | [327, 346] |
| 8 | 999 | LRHLDLSNNSLVSLTYVSFR | 5T4 | 22 | 2392 | SGYLAEADLSYTWDFGDSSG | gp100 |
| | | | [236, 255] | | | | [248, 267] |
| 8 | 1000 | PWPERLSNNVEELLQSSLSL | ACRBP | 22 | 2393 | DLASRGLDVHDVTHVYNFDF | HAGE |
| | | | [167, 186] | | | | [545, 564] |
| 8 | 1001 | LYPGFTKRLFRELMGDHVSS | ACTL8 | 22 | 2394 | DQIAKYWELQGSTLKIPHVE | JARID1B |
| | | | [303, 322] | | | | [105, 124] |
| 8 | 1002 | IFVSFNITIILSSLELWIDE | ADAM2 | 22 | 2395 | LQELTLYNPERTITVKGNVE | KOC1 |
| | | | [215, 234] | | | | [315, 334] |
| 8 | 1003 | QKQSSYVGWWIHFRIVEIVV | ADAM29 | 22 | 2396 | FSWELHISELKFQLKSNVIP | KU-CT-1 |
| | | | [185, 204] | | | | [767, 786] |
| 8 | 1004 | KLSQKFTKVNFTEIQKLVLD | AFP | 22 | 2397 | KNKPFYKLQEVKILAQFYND | LIPI |
| | | | [242, 261] | | | | [395, 414] |
| 8 | 1005 | DAMLRKLYNVMFAKKVPEHV | AKAP-3 | 22 | 2398 | SSVRARRATTATTFRARSRA | MAGE-B1 |
| | | | [375, 394] | | | | [319, 338] |
| 8 | 1006 | MTDSDFVSAVKRNLFNQWKQ | AKAP-4 | 22 | 2399 | TTAAAAAAGVSSTKSKKGAK | MAGE-B2 |
| | | | [398, 417] | | | | [67, 86] |
| 8 | 1007 | RYKSYSPYDMLESIRKEVKG | ANXA2 | 22 | 2400 | GRSRSALKKPQRALSTTTSV | MAGE-B3 |
| | | | [231, 250] | | | | [56, 75] |
| 8 | 1008 | PSRQTAIIVNPPPPEYINTK | BRDT | 22 | 2401 | EEERAGARPAVAARAGTTAM | MAGE-B4 |
| | | | [4, 23] | | | | [311, 330] |
| 8 | 1009 | EVPAQLLDAEGAIKIGSEKS | CABYR | 22 | 2402 | FPSSTSSSLSQSSPVSSFPS | MAGE-C1 |
| | | | [397, 416] | | | | [817, 836] |
| 8 | 1010 | ADQRLAISHSQIAHLEERNK | CAGE1 | 22 | 2403 | VVPMPSWLIRTRESVTDDPQ | MORC1 |
| | | | [715, 734] | | | | [143, 162] |
| 8 | 1011 | TQYDLSEFENIGAIGLELWQ | CALR3 | 22 | 2404 | QDVKGYSFIKDLQWIQVSDS | MPHOSPH1 |
| | | | [287, 306] | | | | [304, 323] |
| 8 | 1012 | VEWMSIFKPSKMQRIVALKS | CCDC62 | 22 | 2405 | AAPITEIVSQPERLLFVIDS | NLRP4 |
| | | | [532, 551] | | | | [213, 232] |
| 8 | 1013 | EKTKRLNELKLSVVSLKEIQ | CDCA1 | 22 | 2406 | NKLKPGQMEMLKLTMNKRYN | NXF2 |
| | | | [218, 237] | | | | [207, 226] |
| 8 | 1014 | ALLARKQGAGDSLIAGSAMS | CT45 | 22 | 2407 | ASLTPLLLSITKRSEQIVEF | NY-BR-1 |
| | | | [34, 53] | | | | [115, 134] |
| 8 | 1015 | ESPDLSISHSQVEQLVNKTS | CT46 | 22 | 2408 | NNYAHLTNSSINKSGASYEK | NYD-TSPG |
| | | | [306, 325] | | | | [292, 311] |
| 8 | 1016 | LKEFEKTIHFYQKKIILHEK | CTAGE2 | 22 | 2409 | LKRLAEADSEKARLLLLLQD | ODF2 |
| | | | [408, 427] | | | | [294, 313] |
| 8 | 1017 | TLEGERNQIYIQLSEVDKTK | cTAGE5 | 22 | 2410 | LVQQEQHLKEQQRQLREQLQ | PASD1 |
| | | | [328, 347] | | | | [482, 501] |
| 8 | 1018 | TLQTVHFTSEAVELQDMSLL | CTCFL | 22 | 2411 | SNSIKANPNAPVVRAGWLYK | PEPP2 |
| | | | [81, 100] | | | | [159, 178] |
| 8 | 1019 | LVYDGVADIRKAVLMIRTPE | CTNNA2 | 22 | 2412 | MEARRLASALLFQHEDLIGK | PIWIL1 |
| | | | [615, 634] | | | | [140, 159] |
| 8 | 1020 | QQGLPQGDTQLTTVQGVVTS | CXorf48 | 22 | 2413 | TIGQPTRLRSVAQKILLQIN | PIWIL2 |
| | | | [26, 45] | | | | [703, 722] |
| 8 | 1021 | TDNNLAVYDLSRDILNNFPH | CXorf61 | 22 | 2414 | VGQSIHQEPNRSLSTRLFYL | PIWIL3 |
| | | | [53, 72] | | | | [863, 882] |
| 8 | 1022 | VPPPRFAPAYARPFAPAPAQ | DBPC | 22 | 2415 | GLTDQATSDFQLMKAVAEKT | PIWIL4 |
| | | | [272, 291] | | | | [384, 403] |
| 8 | 1023 | ERGSGIRSVSFYEHIITVGT | DCAF12 | 22 | 2416 | NSHQDFWTVWSGNRASLYSF | PRAME |
| | | | [338, 357] | | | | [127, 146] |
| 8 | 1024 | PRMEEKEALVPIQKATDSFH | DKKL1 | 22 | 2417 | SDIVPPFSAFSPQGMPEGDL | PSMA |
| | | | [141, 160] | | | | [155, 174] |
| 8 | 1025 | ASEGRMVIQDIPAVTSRGHV | DMRT1 | 22 | 2418 | LMKEVRAFGQNYERIFILLE | SAGE1 |
| | | | [178, 197] | | | | [831, 850] |
| 8 | 1026 | KIEVYLRLHRHAYPEQRQDM | DPPA2 | 22 | 2419 | FIQATDYVEIWQAYLDYLRR | SART3 |
| | | | [115, 134] | | | | [411, 430] |
| 8 | 1027 | TVNGEQLDLDPGQTLIYYVD | EpCAM | 22 | 2420 | LSRVYSKLYKEAEKIKKWKV | SCP-1 |
| | | | [234, 253] | | | | [102, 121] |
| 8 | 1028 | DLEPHMNYTFTVEARNGVSG | EPHA2 | 22 | 2421 | ESTSAHIIEETEYVKKIRTT | se57-1 |
| | | | [401, 420] | | | | [24, 43] |
| 8 | 1029 | AKLTKESYPVVVAESMYGDF | FAM46D | 22 | 2422 | TQVKDEAAAQPLNLSSRPKT | SOX-6 |
| | | | [192, 211] | | | | [414, 433] |
| 8 | 1030 | LQEYAGNFQGIRFHYDRNPG | FATE1 | 22 | 2423 | EDYKEKTVIDKSHLSKIETR | SPAG1 |
| | | | [98, 117] | | | | [175, 194] |
| 8 | 1031 | QILDSLSYMRNENVISELNI | PBX039 | 22 | 2424 | QRHTEMIHNYMEHLERTKLH | SPAG9 |
| | | | [181, 200] | | | | [161, 180] |
| 8 | 1032 | ESLKMRVSKPFGMLMLSIWI | FMR1NB | 22 | 2425 | MIYKLVQSNTYATKRDIYYT | SPO11 |
| | | | [59, 78] | | | | [120, 139] |
| 8 | 1033 | ILKQKSIIKLSSERKKEDIE | FSIP1 | 22 | 2426 | EYLERQLQAEFIESGQYRAN | TAF7L |
| | | | [416, 435] | | | | [365, 384] |
| 8 | 1034 | HEQVKTIKELGGYVSNLRKI | FTHL17 | 22 | 2427 | QNRVEVLAGDLRFSKLSLED | TAG-1 |
| | | | [140, 159] | | | | [370, 389] |
| 8 | 1035 | DENGYTALTWAARQGHKNIV | GASZ | 22 | 2428 | MFSDLRSLQLKKTMEIKGTV | TDRD1 |
| | | | [179, 198] | | | | [251, 270] |
| 8 | 1036 | KLESSHSRGSMTALGGASSS | GATA-3 | 22 | 2429 | ERRSQFPVLHMEVIVHLLLQ | TEX14 |
| | | | [195, 214] | | | | [340, 359] |
| 8 | 1037 | YYPEDLFIDKKVLKVAHVEH | Glypican- | 22 | 2430 | ELDHLALEWQITPSFESLSQ | TEX15 |
| | | | 3 | | | | [320, 339] |
| | | | [361, 380] | | | | |
| 8 | 1038 | SYTWDFGDSSGTLISRALVV | gp100 | 22 | 2431 | RLLRLIILLRIFHLFHQKRQ | TPTE |
| | | | [257, 276] | | | | [195, 214] |
| 8 | 1039 | KALENFKTGKVRILIATDLA | HAGE | 22 | 2432 | LAENKMAIQSRDVAQFRNVV | TSGA10 |
| | | | [528, 547] | | | | [601, 620] |
| 8 | 1040 | QRLFENLRMLPHAPGVQMQA | HDAC1 | 22 | 2433 | RNTLEGFASPLTGIADASQS | TYR |
| | | | [364, 383]; | | | | [341, 360] |
| | | | HDAC2 | | | | |
| | | | [365, 384] | | | | |
| 8 | 1041 | YGLYKKMIVFKPYQASQHDM | HDAC3 | 23 | 2434 | LAQLPSLRHLDLSNNSLVSL | 5T4 |
| | | | [39, 58] | | | | [230, 249] |
| 8 | 1042 | NHHSERSRNHLERSLSQSDR | HOM-TES-85 | 23 | 2435 | VIEGKPYTVNLMQKNFLPHN | ADAM2 |
| | | | [156, 175] | | | | [50, 69] |
| 8 | 1043 | RKPRPPHTHSYTISHATLER | IGFS11 | 23 | 2436 | YLQNAFLVAYTKKAPQLTSS | AFP |
| | | | [394, 413] | | | | [426, 445] |
| 8 | 1044 | TNGSEVQSSWAETTYWISPQ | IL13RA2 | 23 | 2437 | ERPLASSPPRLYEDDETPGA | AKAP-3 |
| | | | [114, 133] | | | | [630, 649] |
| 8 | 1045 | GEARLREMEALQSLRLANEG | JARID1B | 23 | 2438 | LIMAKYSNDGAALAELEEQA | AKAP-4 |
| | | | [1146, 1165] | | | | [709, 728] |
| 8 | 1046 | QVNTDSETAVVNVTYSSKDQ | KOC1 | 23 | 2439 | DTTTPATSAVKASSEFSPTF | BRDT |
| | | | [112, 131] | | | | [216, 235] |
| 8 | 1047 | THEDKIVRRNATMIFGILAS | KU-CT-1 | 23 | 2440 | KFHWVEAFDDEMTEKPEFQS | CAGE1 |
| | | | [77, 96] | | | | [126, 145] |
| 8 | 1048 | VLKDFTVSGNLLFMSVRDQD | Lage-1 | 23 | 2441 | STIEKQRKELQLLIGELKDR | CCDC62 |
| | | | [122, 141] | | | | [21, 40] |
| 8 | 1049 | GETRLALVQRNVAIMKSIIP | LDHC | 23 | 2442 | SNSGRLSGPAELRSFNMPSL | cTAGE5 |
| | | | [103, 122] | | | | [629, 648] |
| 8 | 1050 | LDGAQDSDDSEELNIILQGN | LEMD1 | 23 | 2443 | ATIIARKSDLRVHMRNLHAY | CTCFL |
| | | | [58, 77] | | | | [434, 453] |
| 8 | 1051 | DGSFSFKLLNQLGMIEEPRL | LIPI | 23 | 2444 | FIDASRLVYDGVRDIRKAVL | CTNNA2 |
| | | | [373, 392] | | | | [609, 628] |
| 8 | 1052 | APEEEIWEELSVMEVYDGRE | MAGE-A1 | 23 | 2445 | YGSEWSVYAVGSQAHVSFLD | DCAF12 |
| | | | [209, 228] | | | | [304, 323] |
| 8 | 1053 | DPARYEFLWGPRAHAEIRKM | MAGE-A10 | 23 | 2446 | IEKVVQMTNDDIKRIGVRLP | EPHA2 |
| | | | [290, 309] | | | | [933, 952] |
| 8 | 1054 | REDSGDFGLQVSTMFSEDDF | MAGE-A11 | 23 | 2447 | MYSAELWRYRTITFSGRPSR | FBXO39 |
| | | | [23, 42] | | | | [50, 69] |
| 8 | 1055 | EEQETASSSSTLVEVTLREV | MAGE-A12 | 23 | 2448 | DVERNESLIKSGKKPFSNTE | FSIP1 |
| | | | [34, 53] | | | | [223, 242] |
| 8 | 1056 | EEQQTASSSSTLVEVTLGEV | MAGE-A2 | 23 | 2449 | FTKNGITSKDQQKILAALKE | GASZ |
| | | | [34, 53] | | | | [313, 332] |
| 8 | 1057 | SEFQAALSRKVAELVHFLLL | MAGE-A3 | 23 | 2450 | LGSDINVDDMVNELFDSLFP | Glypican- |
| | | | [103, 122] | | | | 3 |
| | | | | | | | [157, 176] |
| 8 | 1058 | DGREHTVYGEPRKLLTQDWV | MAGE-A4 | 23 | 2451 | ANASFSIALNFPGSQKVLPD | gp100 |
| | | | [233, 252] | | | | [80, 99] |
| 8 | 1059 | GSDPVRYEFLWGPRALAETS | MAGE-A8 | 23 | 2452 | QKPTPIQSQAWPIVLQGIDL | HAGE |
| | | | [266, 285] | | | | [263, 282] |
| 8 | 1060 | ETSYEKVINYLVMLNAREPI | MAGE-A9 | 23 | 2453 | VPTELVEKEFWRLVSTIEED | JARID1B |
| | | | [279, 298] | | | | [401, 420] |
| 8 | 1061 | PRAYAETTKMKVLEFLAKMN | MAGE-B1 | 23 | 2454 | IDVHRKENAGAAEKSITILS | KOC1 |
| | | | [274, 293] | | | | [229, 248] |
| 8 | 1062 | KASEGLSVVFGLELNKVNPN | MAGE-B2 | 23 | 2455 | EENKTTLLELGAVEPLTKLL | KU-CT-1 |
| | | | [155, 174] | | | | [57, 76] |
| 8 | 1063 | FWAKVNKTVPSAFQFWYEEA | MAGE-B3 | 23 | 2456 | GLDPAGPRFSRKPPYSRLDY | LIPI |
| | | | [291, 310] | | | | [202, 221] |
| 8 | 1064 | DTTPNNFPLLYEEALRDEEE | MAGE-B4 | 23 | 2457 | FSQGLSSTVQSRTDPLIMKT | MAGE-B3 |
| | | | [294, 313] | | | | [96, 115] |
| 8 | 1065 | PHLYEDALIDEVERALRLRA | MAGE-B6 | 23 | 2458 | VLRDTASSSLAFGIPQEPQR | MAGE-B4 |
| | | | [388, 407] | | | | [45, 64] |
| 8 | 1066 | IESEPLFTYTLDEKVDELAR | MAGE-C1 | 23 | 2459 | RELLTKVWVQEHYLEYREVP | MAGE-C1 |
| | | | [898, 917] | | | | [1041, 1060] |
| 8 | 1067 | KKKVLEFLAKLNNTVPSSFP | MAGE-C2 | 23 | 2460 | KISEDKLKNLRIKLALLLQK | MORC1 |
| | | | [311, 330] | | | | [911, 930] |
| 8 | 1068 | EKQRELKTARTLSLFYGVNV | MORC1 | 23 | 2461 | KMKESDHQIIKRRLRTKTAK | MPHOSPH1 |
| | | | [341, 360] | | | | [1801, 1820] |
| 8 | 1069 | KKIIETMSSSKLSNVEASKE | MPHOSPH1 | 23 | 2462 | QSTTSVYSSFVFNLFTPEGA | NLRP4 |
| | | | [1749, 1768] | | | | [366, 385] |
| 8 | 1070 | AASRYNLTISDVSVSDVPFP | MUC-1 | 23 | 2463 | NVSQQALDLQNLRFDPDLMG | NXF2 |
| | | | [1128, 1147] | | | | [226, 245] |
| 8 | 1071 | EAFSRASLVSVYNSYPYYPY | NKX3.1 | 23 | 2464 | NVDVSSTIYNNEVLHQPLSE | NY-BR-1 |
| | | | [203, 222] | | | | [1180, 1199] |
| 8 | 1072 | KFKEHLKQMTLQLELKQIPW | NLRP4 | 23 | 2465 | FELFGFDILIDDNLKPWLLE | NYD-TSPG |
| | | | [25, 44] | | | | [367, 386] |
| 8 | 1073 | LLSSTWQELILLSSLTVYSK | NR6A1 | 23 | 2466 | EKAQAKTASELSKSMESMRG | ODF2 |
| | | | [319, 338] | | | | [328, 347] |
| 8 | 1074 | SETLKHLVLQFLQQYYSIYD | NXF2 | 23 | 2467 | VAFNQQQLVQQEQHLKEQQR | PASD1 |
| | | | [385, 404] | | | | [475, 494] |
| 8 | 1075 | AQRKSKSLKINLNYAGDALR | NY-BR-1 | 23 | 2468 | RSMRDDTMWQLYEWQQRQFY | PEPP2 |
| | | | [1200, 1219] | | | | [493, 512] |
| 8 | 1076 | LVKRKLVHDIIDLIYLNGLR | NYD-TSPG | 23 | 2469 | ADGSEVSFLEYYRKQYNQEI | PIWIL1 |
| | | | [402, 421] | | | | [335, 354] |
| 8 | 1077 | SMQNYVQFLKSSYANVFGDG | ODF2 | 23 | 2470 | RGPAQRESVGLVSMFRGLGI | PIWIL2 |
| | | | [792, 811] | | | | [61, 80] |
| 8 | 1078 | SISARTKAFRVDSTPGPAAY | ODF3 | 23 | 2471 | RNEWYDFFIVSQSVQDGTVT | PIWIL3 |
| | | | [123, 142] | | | | [792, 811] |
| 8 | 1079 | DLSRSLFYQRWPVDVSNRIH | ODF4 | 23 | 2472 | NPAAFVRAIQQYVDPDVQLV | PIWIL4 |
| | | | [106, 125] | | | | [528, 547] |
| 8 | 1080 | SMEWDTQVVKGSSPLGPAGL | OIP5 | 23 | 2473 | SLFFLRGRLDQLLRHVMNPL | PRAME |
| | | | [36, 55] | | | | [305, 324] |
| 8 | 1081 | SQGQRGHTSMKAVYVEPAAA | PASD1 | 23 | 2474 | KLGSGNDFEVFFQRLGIASG | PSMA |
| | | | [212, 231] | | | | [514, 533] |
| 8 | 1082 | MQKLGFGTGVNVYLMKRSPR | PBK | 23 | 2475 | YKPDSNEFAVGTKNYSVSAG | SAGE1 |
| | | | [35, 54] | | | | [777, 796] |
| 8 | 1083 | LHKEKYTLEQALLSASQEIE | PEPP2 | 23 | 2476 | LQQLEKYKPYEEALLQAEAP | SART3 |
| | | | [659, 678] | | | | [289, 308] |
| 8 | 1084 | VGQSIHREPNLSLSNRLYYL | PIWIL1 | 23 | 2477 | TPEIYWKLDSKAVPSQTVSR | SCP-1 |
| | | | [842, 861] | | | | [803, 822] |
| 8 | 1085 | HFWALFYPKRAMDQARELVN | PIWIL2 | 23 | 2478 | VDGKKLRIGEYKQLMRSRRQ | SOX-6 |
| | | | [604, 623] | | | | [700, 719] |
| 8 | 1086 | SREIRELPLLNAMPLHSWLI | PIWIL3 | 23 | 2479 | LPTVVAYNNRAQAEIKLQNW | SPAG1 |
| | | | [493, 512] | | | | [239, 258] |
| 8 | 1087 | QHKLSLWPGFAISVSYFERK | PIWIL4 | 23 | 2480 | LMELQEAVRWTEMIRASREN | SPAG9 |
| | | | [237, 256] | | | | [522, 541] |
| 8 | 1088 | LQALYVDSLFFLRGRLDQLL | PRAME | 23 | 2481 | LLPSDLKRLNVPKDSLIPLT | SPO11 |
| | | | [298, 317] | | | | [313, 332] |
| 8 | 1089 | LTSPSMEIKEVASIILHKDF | PRSS55 | 23 | 2482 | LATSHMDFSTKSVFSKFAQL | TAG-1 |
| | | | [129, 148] | | | | [208, 227] |
| 8 | 1090 | KRQIYVAAFTVQAAAETLSE | PSMA | 23 | 2483 | YPRIISDVLIDEHLVLKSAS | TDRD1 |
| | | | [729, 748] | | | | [880, 899] |
| 8 | 1091 | NILMLHEVVFDRKSGSLALI | RAGE-1 | 23 | 2484 | WNSQEFIQTLSDDFISVRER | TEX14 |
| | | | [62, 81] | | | | [1245, 1264] |
| 8 | 1092 | SQPTPDNVLSAVTPELINLA | SAGE1 | 23 | 2485 | LSRKLDKAVVHLKKAHRRVH | TEX15 |
| | | | [402, 421] | | | | [993, 1012] |
| 8 | 1093 | QVISVTFEKALNAGFIQATD | SART3 | 23 | 2486 | SVLDNITTDKILIDVFDGLP | TPTE |
| | | | [397, 416] | | | | [452, 471] |
| 8 | 1094 | KDKRDYLWTSAKNTLSTPLP | SCP-1 | 23 | 2487 | AVQELRRQNYSSNAYHMSST | TSGA10 |
| | | | [833, 852] | | | | [644, 663] |
| 8 | 1095 | QEEKILNMFRQQQKILQQSR | SCP3a | 23 | 2488 | SPLTGIADASQSSMHNALHI | TYR |
| | | | [146, 165] | | | | [349, 368] |
| 8 | 1096 | DRDEAWVLETIGKYWAAEKV | SCRN1 | 24 | 2489 | RHLDLSNNSLVSLTYVSFRN | 5T4 |
| | | | [161, 180] | | | | [237, 256] |
| 8 | 1097 | KKIRTTLQKIRTQMFKDEIR | se57-1 | 24 | 2490 | IEPLESSVGFEHVIYQVKHK | ADAM2 |
| | | | [38, 57] | | | | [127, 146] |
| 8 | 1098 | DISSGLVAIFIAFYGDRKKV | SLCO6A1 | 24 | 2491 | FQTKAATVTKELRESSLLNQ | AFP |
| | | | [152, 171] | | | | [202, 221] |
| 8 | 1099 | QEMRQFFTVGQQPQIPITTG | SOX-6 | 24 | 2492 | DDKSGDASRLTSAFPDSLYE | AKAP-3 |
| | | | [719, 738] | | | | [697, 716] |
| 8 | 1100 | REILREQPDNIPAFAAAYFE | SP17 | 24 | 2493 | SDMMVSLMKTLKVHSSGKPI | AKAP-4 |
| | | | [25, 44] | | | | [342, 361] |
| 8 | 1101 | YLSKAERFKMMLTLISKGQK | SPAG1 | 24 | 2494 | NYDEKRQLSLNINKLPGDKL | BRDT |
| | | | [875, 894] | | | | [511, 530] |
| 8 | 1102 | AQRKRFTRVEMARVLMERNQ | SPAG9 | 24 | 2495 | DQLGNEYFRQPPPRSPPLIH | CAGE1 |
| | | | [498, 517] | | | | [176, 195] |
| 8 | 1103 | EVLEERTRIQFIRWSHTRIF | SPATA19 | 24 | 2496 | QTALQKTQLQLQEMAQKATH | CCDC62 |
| | | | [106, 125] | | | | [104, 123] |
| 8 | 1104 | SSDYLSRVYLPNKLKFGGWI | SPO11 | 24 | 2497 | KSLKSQVAEAKMTFKIFQMN | cTAGE5 |
| | | | [377, 396] | | | | [181, 200] |
| 8 | 1105 | SYVYMKRNYKAMTKLGFKVT | SSX-1 | 24 | 2498 | KKGRSKKAHVLAASVEQATQ | CTNNA2 |
| | | | [47, 66] | | | | [50, 69] |
| 8 | 1106 | WEKMKASEKIFYVYMKRKYE | SSX-2 | 24 | 2499 | SRERGSGIRSVSFYEHIITV | DCAF12 |
| | | | [37, 56] | | | | [336, 355] |
| 8 | 1107 | FGRLQGIFPKIMPKKPAEEG | SSX-3 | 24 | 2500 | LVLAGVGFFIHRRRKNQRAR | EPHA2 |
| | | | [101, 120] | | | | [549, 568] |
| 8 | 1108 | EVMTKLGFKVTLPPFMRSKR | SSX-4 | 24 | 2501 | KLARQATNLKVNFFFERIMK | FBXO39 |
| | | | [56, 75] | | | | [275, 294] |
| 8 | 1109 | RGKHAWTHRVRERKQLVIYE | SSX-5 | 24 | 2502 | LSAASPTISSFSPRLENRNN | FSIP1 |
| | | | [159, 178] | | | | [330, 349] |
| 8 | 1110 | KERISALNLQIEEEKNKQRQ | SYCE1 | 24 | 2503 | KFKKAMTIGDVSLVQELLDS | GASZ |
| | | | [134, 153] | | | | [49, 68] |
| 8 | 1111 | KQKNEKLISLQEQLQRFLKK | TAF7L | 24 | 2504 | HQVRSFFQRLQPGLKWVPET | Glypican- |
| | | | [443, 462] | | | | 3 |
| | | | | | | | [36, 55] |
| 8 | 1112 | QALAPDFRLNPVRRLIPAAR | TAG-1 | 24 | 2505 | PSGSWSQKRSFVYVWKTWGQ | gp100 |
| | | | [413, 432] | | | | [139, 158] |
| 8 | 1113 | SEDDQWYRASVLAYASEESV | TDRD1 | 24 | 2506 | STDKVIVFVSRKAVADHLSS | HAGE |
| | | | [553, 572] | | | | [486, 505] |
| 8 | 1114 | IMLLERSIMAKEGPLKVAQT | TEKT5 | 24 | 2507 | DMRRLIDLGVGLAPYSAVEK | JARID1B |
| | | | [374, 393] | | | | [937, 956] |
| 8 | 1115 | KDRTMNLQDIRYILKNDLKD | TEX14 | 24 | 2508 | AIIGKQGQHIKQLSRFAGAS | KOC1 |
| | | | [497, 516] | | | | [419, 438] |
| 8 | 1116 | ALKSRISWEGLLALDNGEME | TEX15 | 24 | 2509 | ILETKELNDLHIEALAVIAN | KU-CT-1 |
| | | | [712, 731] | | | | [240, 259] |
| 8 | 1117 | KPKPHVSDHNRLLHLARPKA | THEG | 24 | 2510 | AEPLFEQNNSLNVNFNTQKK | LIPI |
| | | | [289, 308] | | | | [77, 96] |
| 8 | 1118 | DSKLYIPLEYRSISLAIALF | TPTE | 24 | 2511 | DLVKLKYLEYRQVPNSNPAR | MAGE-B3 |
| | | | [117, 136] | | | | [251, 270] |
| 8 | 1119 | DDERMEQMSNMTLMKETIST | TSGA10 | 24 | 2512 | NMLGIYDGKRHLIFGEPRKL | MAGE-B4 |
| | | | [155, 174] | | | | [225, 244] |
| 8 | 1120 | RGQRPRTSAPSRAGALLLLL | TSP50 | 24 | 2513 | PGSPSFSSTLLSLFQSSPER | MAGE-C1 |
| | | | [10, 29] | | | | [376, 395] |
| 8 | 1121 | ESEQAALGEEAVLLLDDIMA | TSPY1 | 24 | 2514 | RLSTLKFIGQYGNGLKSGSM | MORC1 |
| | | | [53, 72] | | | | [89, 108] |
| 8 | 1122 | KSYLEQASRIWSWLLGAAMV | TYR | 24 | 2515 | KSSGQMAQKFSFSKVFGPAT | MPHOSPH1 |
| | | | [465, 484] | | | | [104, 123] |
| 8 | 1123 | LLLRTPYSSDNLYQMTSQLE | WT1 | 24 | 2516 | KQKFSRLWSSKSVTEIHLYF | NLRP4 |
| | | | [215, 234] | | | | [104, 123] |
| 8 | 1124 | KIESQRIISGRISGYISEAS | ZNF165 | 24 | 2517 | NEWNYTRAGQAFTMLQTEGK | NXF2 |
| | | | [201, 220] | | | | [597, 616] |
| 9 | 1125 | AYPEKMANRVLLELNSADLD | 5T4 | 24 | 2518 | KEILEAEIESHHPRLASAVQ | NY-BR-1 |
| | | | [324, 343] | | | | [1132, 1151] |
| 9 | 1126 | DENSYWRNQNPGSLLQLPHT | ACRBP | 24 | 2519 | LMAEDEPSGALLKPLVFRVD | NYD-TSPG |
| | | | [303, 322] | | | | [73, 92] |
| 9 | 1127 | HPDTFSYPIERGRILNWEGV | ACTL8 | 24 | 2520 | DEMNKEIEAARRQFQSQLAD | ODF2 |
| | | | [59, 78] | | | | [576, 595] |
| 9 | 1128 | DVAFLLVYREKSNYVGATFQ | ADAM2 | 24 | 2521 | DSVDLGAAGASAQPLQPSSP | PASD1 |
| | | | [264, 283] | | | | [345, 364] |
| 9 | 1129 | LFGLEIWTNKNLIVVDDVRK | ADAM29 | 24 | 2522 | RRGWLYKQDSTGMKLWKKRW | PEPP2 |
| | | | [245, 264] | | | | [172, 191] |
| 9 | 1130 | QLAVSVILRVAKGYQELLEK | AFP | 24 | 2523 | WYDFFIVSQAVRSGSVSPTH | PIWIL1 |
| | | | [364, 383] | | | | [774, 793] |
| 9 | 1131 | LMTDTQFVSAVKRTVFSHGS | AKAP-3 | 24 | 2524 | LLPELSFMTGIPEKMKKDFR | PIWIL2 |
| | | | [348, 367] | | | | [493, 512] |
| 9 | 1132 | KEFADSISKGLMVYANQVAS | AKAP-4 | 24 | 2525 | ALLDHEAKKMSTYLKTISPN | PIWIL3 |
| | | | [323, 342] | | | | [733, 752] |
| 9 | 1133 | EVDMLKIRSEFKRKYGKSLY | ANXA2 | 24 | 2526 | VAESSSNTSSRLSVIVVRKK | PIWIL4 |
| | | | [297, 316] | | | | [715, 734] |
| 9 | 1134 | DEIEIDFETLKASTLRELEK | BRDT | 24 | 2527 | LAKFSPYLGQMINLRRLLLS | PRAME |
| | | | [550, 569] | | | | [249, 268] |
| 9 | 1135 | EYSDKTTQFPSVYAVPGTEQ | CABYR | 24 | 2528 | NDQLMFLERAFIDPLGLPDR | PSMA |
| | | | [114, 133] | | | | [665, 684] |
| 9 | 1136 | KNKSVSQYLEMDKTLSKKEE | CAGE1 | 24 | 2529 | MPAMSTRDQHATIIHNLREE | SAGE1 |
| | | | [431, 450] | | | | [378, 397] |
| 9 | 1137 | NIGAIGLELWQVRSGTIFDN | CALR3 | 24 | 2530 | EEDEVKAARTRRKVLSRAVA | SART3 |
| | | | [296, 315] | | | | [25, 44] |
| 9 | 1138 | LHNLRQIYVKQQSDLQFLNF | CCDC62 | 24 | 2531 | RVQAENSRLEMHFKLKEDYE | SCP-1 |
| | | | [282, 301] | | | | [229, 248] |
| 9 | 1139 | KNDLYPNPKPEVLHMIYMRA | CDCA1 | 24 | 2532 | QQPHGVDGKLSSINNMGLNS | SOX-6 |
| | | | [33, 52] | | | | [517, 536] |
| 9 | 1140 | MMQKPGSNAPVGGNVTSSFS | CT45 | 24 | 2533 | GTTKTFKIPIEHLDFKYIEK | SPAG1 |
| | | | [84, 103] | | | | [13, 32] |
| 9 | 1141 | ISTEHQSLVLVKRLLAVSVS | CT46 | 24 | 2534 | EQKREQYRQVKAHVQKEDGR | SPAG9 |
| | | | [20, 39] | | | | [623, 642] |
| 9 | 1142 | PPWEQDYRNMFPPPGQSYPD | CTAGE2 | 24 | 2535 | ARNEAPAFTIDNRSSWENIK | SPO11 |
| | | | [566, 585] | | | | [63, 82] |
| 9 | 1143 | SVRSRLYVGREKKLALMLSG | cTAGE5 | 24 | 2536 | EPVQQDMNGILLGYEIRYWK | TAG-1 |
| | | | [65, 84] | | | | [834, 853] |
| 9 | 1144 | DSKLAVSLAETTGLIKLEEE | CTCFL | 24 | 2537 | LQKQVEKHEHILLFLLNNST | TDRD1 |
| | | | [166, 185] | | | | [1147, 1166] |
| 9 | 1145 | NAVVLTVKASYVASTKYQKV | CTNNA2 | 24 | 2538 | LEAQLHEYVKQGNYVKVKKI | TEX14 |
| | | | [874, 893] | | | | [23, 42] |
| 9 | 1146 | FIWRAISITPVHKSSSGFQD | CXorf48 | 24 | 2539 | LVELQMMMETIQFIENKKRH | TEX15 |
| | | | [229, 248] | | | | [1690, 1709] |
| 9 | 1147 | LEHTLLSKGFRGASPHRKST | CXorf61 | 24 | 2540 | AARVSPISESVLARLSKFEV | TPTE |
| | | | [94, 113] | | | | [49, 68] |
| 9 | 1148 | PQRPRNRPYFQRRRQQAPGP | DBPC | 24 | 2541 | EIQGNVKVLKSERDKIFLLY | TSGA10 |
| | | | [316, 335] | | | | [49, 68] |
| 9 | 1149 | VVDVQTSQITKIPILKDREP | DCAF12 | 25 | 2542 | FLLVYREKSNYVGATFQGKM | ADAM2 |
| | | | [114, 133] | | | | [267, 286] |
| 9 | 1150 | LEGGHWLSEKRHRLQAIRDG | DKKL1 | 25 | 2543 | EKNIFLASFVHEYSRRHPQL | AFP |
| | | | [184, 203] | | | | [346, 365] |
| 9 | 1151 | PPSYLGQSVPQFFTFEDAPS | DMRT1 | 25 | 2544 | FRGQERPDDFTASVSEGIMT | AKAP-3 |
| | | | [296, 315] | | | | [268, 287] |
| 9 | 1152 | SRKRKAVTKRARLQRSYEMN | DPPA2 | 25 | 2545 | SQKMDMSNIVLMLIQKLLNE | AKAP-4 |
| | | | [147, 166] | | | | [621, 640] |
| 9 | 1153 | DSKSLRTALQKEITTRYQLD | EpCAM | 25 | 2546 | RRRREAMVGTIDMTLQSDIM | BRDT |
| | | | [158, 177] | | | | [920, 939] |
| 9 | 1154 | RARRPKFADIVSILDKLIRA | EPHA2 | 25 | 2547 | LEKRVKELQMKITKQQVFID | CAGE1 |
| | | | [858, 877] | | | | [333, 352] |
| 9 | 1155 | SRFFIDFPHIEEQQKKIESY | FAM46D | 25 | 2548 | LHDELLFTVEREKRKDELLN | CCDC62 |
| | | | [264, 283] | | | | [250, 269] |
| 9 | 1156 | LVIAEMMELGSRSRGASQKK | FATE1 | 25 | 2549 | SENGAYLDNPPKGALKKLIH | cTAGE5 |
| | | | [32, 51] | | | | [299, 318] |
| 9 | 1157 | EDYFSHHLAVYNSPQFKKTM | FBXO39 | 25 | 2550 | LANRFKEFGKEMVKLNYVAA | CTNNA2 |
| | | | [201, 220] | | | | [172, 191] |
| 9 | 1158 | EMENTKKFLSLTAVSEETVG | FSIP1 | 25 | 2551 | NKNKELGAVSLDGYFHLWKA | DCAF12 |
| | | | [168, 187] | | | | [262, 281] |
| 9 | 1159 | DKMEHAQKLMRLQNLRGGHI | FTHL17 | 25 | 2552 | EKDGEFSVLQLVGMLRGIAA | EPHA2 |
| | | | [62, 81] | | | | [706, 725] |
| 9 | 1160 | GHLITAVQNVITELPVNSQK | GASZ | 25 | 2553 | ALRVFKARIYTNRYETNEED | FBXO39 |
| | | | [368, 387] | | | | [395, 414] |
| 9 | 1161 | QGNHVPPYYGNSVRATVQRY | GATA-3 | 25 | 2554 | KELDSQLQDAIQKMKKLDKI | FSIP1 |
| | | | [56, 75] | | | | [109, 128] |
| 9 | 1162 | KMEEKYQLTARLNMEQLLQS | Glypican- | 25 | 2555 | QLLQSASMELKFLIIQNAAV | Glypican- |
| | | | 3 | | | | 3 |
| | | | [76, 95] | | | | [91, 110] |
| 9 | 1163 | MEVTVYHAAGSRSYVPLAHS | gp100 | 25 | 2556 | LADTNSLAVVSTQLIMPGQE | gp100 |
| | | | [184, 203] | | | | [571, 590] |
| 9 | 1164 | LMPGFIHLVLQPSLKGQRNR | HAGE | 25 | 2557 | PSLKGQRNRPGMLVLTPTRE | HAGE |
| | | | [297, 316] | | | | [308, 327] |
| 9 | 1165 | PYNDYFEYFGPDFKLHISPS | HDAC1 | 25 | 2558 | LTESKETASAMATLGEARLR | JARID1B |
| | | | [329, 348]; | | | | [1132, 1151] |
| | | | HDAC2 | | | | |
| | | | [330, 349] | | | | |
| 9 | 1166 | SPTNMQGFTKSLNAFNVGDD | HDAC3 | 25 | 2559 | RIRKLQIRNIPPHLQWEVLD | KOC1 |
| | | | [74, 93] | | | | [79, 98] |
| 9 | 1167 | EVSESPGSIQVARGQPAVLP | IGFS11 | 25 | 2560 | DLRAVLLINSKSYVSPPSSM | KU-CT-1 |
| | | | [24, 43] | | | | [597, 616] |
| 9 | 1168 | TVEYELKYRNIGSETWKTII | IL13RA2 | 25 | 2561 | KNLLKHGASLDNFHFIGVSL | LIPI |
| | | | [66, 85] | | | | [162, 181] |
| 9 | 1169 | FKSDYFNMPVHMVPTELVEK | JARID1B | 25 | 2562 | ALSTTTSVDVSYKKSYKGAN | MAGE-B3 |
| | | | [389, 408] | | | | [68, 87] |
| 9 | 1170 | QFEQSETETVHLFIPALSVG | KOC1 | 25 | 2563 | VAARRGTTAMTSAYSRATSS | MAGE-B4 |
| | | | [399, 418] | | | | [321, 340] |
| 9 | 1171 | AAYNKLLNNNLSLKYSQTGY | KU-CT-1 | 25 | 2564 | DVQSPLQNPASSFFSSALLS | MAGE-C1 |
| | | | [542, 561] | | | | [123, 142] |
| 9 | 1172 | ITMPFSSPMEAELVRRILSR | Lage-1 | 25 | 2565 | EVKKAEEAVKIAESILKEAQ | MORC1 |
| | | | [92, 111] | | | | [288, 307] |
| 9 | 1173 | WKNIHKQVIQSAYEIIKLKG | LDHC | 25 | 2566 | YLAYDETLNVLKFSAIAQKV | MPHOSPH1 |
| | | | [227, 246] | | | | [460, 479] |
| 9 | 1174 | AARAPSTRITYGTITKERDY | LEMD1 | 25 | 2567 | GLRKTDFDEETQALLTAEEE | NLRP4 |
| | | | [118, 137] | | | | [956, 975] |
| 9 | 1175 | NFNTQKKTVWLIHGYRPVGS | LIPI | 25 | 2568 | SLSALPKTQHDLSSILVDVW | NXF2 |
| | | | [90, 109] | | | | [470, 489] |
| 9 | 1176 | SDPARYEFLWGPRALAETSY | MAGE-A1 | 25 | 2569 | VPNKAFELKNEQTLRADPMF | NY-BR-1 |
| | | | [257, 276] | | | | [477, 496] |
| 9 | 1177 | GSDPRSFPLWYEEALKDEEE | MAGE-A10 | 25 | 2570 | DETTPAVVQSVLLERGWNKF | NYD-TSPG |
| | | | [320, 339] | | | | [92, 111] |
| 9 | 1178 | LLTQNWVQEKYLVYRQVPGT | MAGE-A11 | 25 | 2571 | TVTKSHKRGMKGDTVNVRRS | ODF2 |
| | | | [358, 377] | | | | [39, 58] |
| 9 | 1179 | AREPFTKAEMLGSVIRNFQD | MAGE-A12 | 25 | 2572 | GASAQPLQPSSPVAYDIISQ | PASD1 |
| | | | [126, 145] | | | | [353, 372] |
| 9 | 1180 | APEEKIWEELSMLEVFEGRE | MAGE-A2 | 25 | 2573 | YTLEQALLSASQEIEMHADN | PEPP2 |
| | | | [216, 235] | | | | [664, 683] |
| 9 | 1181 | KASSSLQLVFGIELMEVDPI | MAGE-A3 | 25 | 2574 | KSQGLQISAGFQELSLAERG | PIWIL1 |
| | | | [153, 172] | | | | [61, 80] |
| 9 | 1182 | PRALAETSYVKVLEHVVRVN | MAGE-A4 | 25 | 2575 | NFYDPTSAMVLQQHRLQIWP | PIWIL2 |
| | | | [276, 295]; | | | | [342, 361] |
| | | | MAGE-A8 | | | | |
| | | | [278, 297] | | | | |
| 9 | 1183 | RKVAKLVHFLLLKYRAREPV | MAGE-A6 | 25 | 2576 | NKLIGSIVLTKYNNKTYRVD | PIWIL3 |
| | | | [111, 130] | | | | [316, 335] |
| 9 | 1184 | VAELVRFLLRKYQIKEPVTK | MAGE-A8 | 25 | 2577 | ILPSNQKTYYDSIKKYLSSD | PIWIL4 |
| | | | [116, 135] | | | | [550, 569] |
| 9 | 1185 | NYKRYFPVIFGKASEFMQVI | MAGE-A9 | 25 | 2578 | DELFSYLIEKVKRKKNVLRL | PRAME |
| | | | [141, 160] | | | | [189, 208] |
| 9 | 1186 | DHFTEILNGASRRLELVFGL | MAGE-B1 | 25 | 2579 | YDVLLSYPNKTHPNYISIIN | PSMA |
| | | | [144, 163] | | | | [113, 132] |
| 9 | 1187 | TKGEMLKIVGKRFREHFPEI | MAGE-B2 | 25 | 2580 | AFINMAATGVSSMSTRDQYA | SAGE1 |
| | | | [133, 152] | | | | [604, 623] |
| 9 | 1188 | ILKKASFNMEVVFGVDLKKV | MAGE-B3 | 25 | 2581 | YVEFKEEKSALQALEMDRKS | SART3 |
| | | | [152, 171] | | | | [750, 769] |
| 9 | 1189 | EPTTKAEMLKIISKKYKEHF | MAGE-B4 | 25 | 2582 | SEEETLKTLYRNNNPPASHL | SCP-1 |
| | | | [128, 147] | | | | [905, 924] |
| 9 | 1190 | EYKPYFPQILNRTSQHLVVA | MAGE-B6 | 25 | 2583 | KQIEQLYAAQLASMQVSPGA | SOX-6 |
| | | | [228, 247] | | | | [364, 383] |
| 9 | 1191 | PVSSSFSYTLLSLFQSSPER | MAGE-C1 | 25 | 2584 | RKDKPAATAASFTAEEWEKI | SPAG1 |
| | | | [446, 465] | | | | [76, 95] |
| 9 | 1192 | EEPVTEAEMLMIVIKYKDYF | MAGE-C2 | 25 | 2585 | ESLFEELSSAGSGLIGDVDE | SPAG9 |
| | | | [159, 178] | | | | [380, 399] |
| 9 | 1193 | RAQLRLDFIHANSTTHSFLF | MORC1 | 25 | 2586 | IPLTKRDQMKLDSILRRPYV | SPO11 |
| | | | [10, 29] | | | | [329, 348] |
| 9 | 1194 | EENIGILPRTLNVLFDSLQE | MPHOSPH1 | 25 | 2587 | SPPATYRWKMNGTEMKLEPG | TAG-1 |
| | | | [166, 185] | | | | [66, 85] |
| 9 | 1195 | TDYYQELQRDISEMFLQIYK | MUC-1 | 25 | 2588 | RPAKSKKLNKLVENSLSISN | TDRD1 |
| | | | [1063, 1082] | | | | [135, 154] |
| 9 | 1196 | HQKYLSAPERAHLAKNLKLT | NKX3.1 | 25 | 2589 | QLYNWAAPEVILQKAATVKS | TEX14 |
| | | | [145, 164] | | | | [418, 437] |
| 9 | 1197 | SFFSDFGLMWYLEELKKEEF | NLRP4 | 25 | 2590 | ELQTYHDQLVELLEETKREK | TEX15 |
| | | | [4, 23] | | | | [1758, 1777] |
| 9 | 1198 | SDEGMEVIERLIYLYHKFHQ | NR6A1 | 25 | 2591 | FHNRVVRIMIDDHNVPTLHQ | TPTE |
| | | | [362, 381] | | | | [295, 314] |
| 9 | 1199 | PSLSQEQQEMVQAFSAQSGM | NXF2 | 25 | 2592 | KQKVQDTNLEVNKLKNILKS | TSGA10 |
| | | | [566, 585] | | | | [386, 405] |
| 9 | 1200 | QLKVLIAENTMLTSKLKEKQ | NY-BR-1 | 26 | 2593 | RVSGSSQSPPNLKYKSTLKI | AKAP-3 |
| | | | [1111, 1130] | | | | [201, 220] |
| 9 | 1201 | STQSQALGSLRTTTPAFTLN | NYD-TSPG | 26 | 2594 | DEAVGKVARKQLLDWLLANL | AKAP-4 |
| | | | [9, 28] | | | | [835, 854] |
| 9 | 1202 | KNYEGMIDNYKSQVMKTRLE | ODF2 | 26 | 2595 | LQLPDYYTIIKNPMDLNTIK | BRDT |
| | | | [537, 556] | | | | [61, 80] |
| 9 | 1203 | TKYVFDSAPSHSISARTKAF | ODF3 | 26 | 2596 | NVEELIEDKYKIILEKNDTK | CAGE1 |
| | | | [112, 131] | | | | [360, 379] |
| 9 | 1204 | STLMLFPINIWIFELERNVS | ODF4 | 26 | 2597 | DAPAFNEKASIVLPSQDDFS | CCDC62 |
| | | | [157, 176] | | | | [610, 629] |
| 9 | 1205 | DQASFTTSMEWDTQVVKGSS | OIP5 | 26 | 2598 | RANRDYVFKQVQEAIAGISN | CTNNA2 |
| | | | [29, 48] | | | | [237, 256] |
| 9 | 1206 | TSNSEAISSSSIPQFPITSD | PASD1 | 26 | 2599 | WVYRGEAERIFIELKFTVRD | EPHA2 |
| | | | [658, 677] | | | | [85, 104] |
| 9 | 1207 | NDHYRSVYQKRLMDEAKILK | PBK | 26 | 2600 | QRREKEIKKQGLEMRIKLWE | FSIP1 |
| | | | [71, 90] | | | | [133, 152] |
| 9 | 1208 | RSVPAGLTLQSVSPQSLQGK | PEPP2 | 26 | 2601 | ELKFLIIQNAAVFQEAFEIV | Glypican- |
| | | | [595, 614] | | | | 3 |
| | | | | | | | [99, 118] |
| 9 | 1209 | LQFYNIIFRRLLKIMNLQQI | PIWIL1 | 26 | 2602 | EKVPVSEVMGTTLAEMSTPE | gp100 |
| | | | [209, 228] | | | | [377, 396] |
| 9 | 1210 | RTDGGLFLLADVSHKVIRND | PIWIL2 | 26 | 2603 | GRTGRAGRTGVSITTLTRND | HAGE |
| | | | [369, 388] | | | | [576, 595] |
| 9 | 1211 | KKMSTYLKTISPNNFTLAFI | PIWIL3 | 26 | 2604 | NLNNMPVMEQSVLAHITADI | JARID1B |
| | | | [740, 759] | | | | [460, 479] |
| 9 | 1212 | VAGSMGFNVDYPKIIKVQEN | PIWIL4 | 26 | 2605 | VNTDSETAVVNVTYSSKDQA | KOC1 |
| | | | [509, 528] | | | | [113, 132] |
| 9 | 1213 | SISISALQSLLQHLIGLSNL | PRAME | 26 | 2606 | KIPKEKLPDFSWELHISELK | KU-CT-1 |
| | | | [417, 436] | | | | [758, 777] |
| 9 | 1214 | LYSEELFPEELSVVLGTNDL | PRSS55 | 26 | 2607 | ERMEGRPLRTTVFLDTSGTY | LIPI |
| | | | [110, 129] | | | | [334, 353] |
| 9 | 1215 | RPFYRHVIYAPSSHNKYAGE | P5MA | 26 | 2608 | RAGREHFAFGEPRELLTKVW | MAGE-C1 |
| | | | [684, 703] | | | | [1029, 1048] |
| 9 | 1216 | VYSKQPYTEYISTRWYRAPE | RAGE-1 | 26 | 2609 | PLNSFQYQRAQAMGIPFIIQ | MORC1 |
| | | | [152, 171] | | | | [466, 485] |
| 9 | 1217 | NVLSGLINMAGASIPAMSSR | SAGE1 | 26 | 2610 | VSLDSNSNSKILNVKRATIS | MPHOSPH1 |
| | | | [459, 478] | | | | [502, 521] |
| 9 | 1218 | RTRRKVLSRAVAAATYKTMG | SART3 | 26 | 2611 | FVKQAVNLLQEANFHIIDNV | NLRP4 |
| | | | [33, 52] | | | | [565, 584] |
| 9 | 1219 | GAIRKMREDRWAVIAKMDRK | SCP-1 | 26 | 2612 | VEMRDVHKDQQLRHTPYSIR | NXF2 |
| | | | [946, 965] | | | | [65, 84] |
| 9 | 1220 | LQKKIMMETQQQEIASVRKS | SCP3a | 26 | 2613 | ELEVKQQLEQALRIQDIELK | NY-BR-1 |
| | | | [211, 230] | | | | [1006, 1025] |
| 9 | 1221 | EIEALLGMDLVALGLERGET | SCRN1 | 26 | 2614 | STDVLVKRKLVHDIIDLIYL | NYD-TSPG |
| | | | [103, 122] | | | | [398, 417] |
| 9 | 1222 | EKEKRTLLERKLSLENKLLQ | se57-1 | 26 | 2615 | QLADLQQLPDILKITEAKLA | ODF2 |
| | | | [199, 218] | | | | [592, 611] |
| 9 | 1223 | PGSTRIKARKRKQLHFFDSR | SLCO6A1 | 26 | 2616 | VAENISSLLGHLPAEIVGKK | PASD1 |
| | | | [340, 359] | | | | [57, 76] |
| 9 | 1224 | EGSDQHVASHLPLHPIMHNK | SOX-6 | 26 | 2617 | TLRKTKKMMDLRTERPRSAV | PEPP2 |
| | | | [31, 50] | | | | [868, 887] |
| 9 | 1225 | GKYSAAIALLEPAGSEIADD | SPAG1 | 26 | 2618 | NEYMPSRIIVYRDGVGDGQL | PIWIL1 |
| | | | [466, 485] | | | | [690, 709] |
| 9 | 1226 | KTRDGGSVVGASVFYKDVAG | SPAG9 | 26 | 2619 | RTLGRGSSDASLLPLGRAAG | PIWIL2 |
| | | | [699, 718] | | | | [142, 161] |
| 9 | 1227 | QDIHVTADVVKAHLSKSDLL | SPATA19 | 26 | 2620 | ERRIGGVFQDLVVNTRQDMK | PIWIL3 |
| | | | [81, 100] | | | | [92, 111] |
| 9 | 1228 | ADSKMKAEIQALTFLSSDYL | SPO11 | 26 | 2621 | QLYQYHVTYIPDLASRRLRI | PIWIL4 |
| | | | [362, 381] | | | | [122, 141] |
| 9 | 1229 | AFDDIATYFSKKEWKKMKYS | SSX-1 | 26 | 2622 | SRYISMSVWTSPRRLVELAG | PRAME |
| | | | [24, 43] | | | | [12, 31] |
| 9 | 1230 | PNRGNQVERPQMTFGRLQGI | SSX-2 | 26 | 2623 | LQDFDKSNPIVLRMMNDQLM | PSMA |
| | | | [88, 107] | | | | [650, 669] |
| 9 | 1231 | AQIPEKIQKAFDDIAKYFSK | SSX-3 | 26 | 2624 | GIPSMSTKDLYATVTQNVHE | SAGE1 |
| | | | [15, 34] | | | | [518, 537] |
| 9 | 1232 | WEKMKSSEKIVYVYMKLNYE | SSX-4 | 26 | 2625 | NEQRMKAAEKEAALVQQEEE | SART3 |
| | | | [37, 56] | | | | [577, 596] |
| 9 | 1233 | NGDDAFVRRPRVGSQIPEKM | SSX-5 | 26 | 2626 | KMKDLTFLLEESRDKVNQLE | SCP-1 |
| | | | [2, 21] | | | | [281, 300] |
| 9 | 1234 | KIEDLMEMVQKLQKVGSLEP | SYCE1 | 26 | 2627 | SLYSFRNTSTSPHKPDEGSR | SOX-6 |
| | | | [32, 51] | | | | [88, 107] |
| 9 | 1235 | KDKLKIDLLPDGRHAVVEVE | TAF7L | 26 | 2628 | RSGQFAEAAGKYSAAIALLE | SPAG1 |
| | | | [126, 145] | | | | [457, 476] |
| 9 | 1236 | TDGRHFVSQTTGNLYIARTN | TAG-1 | 26 | 2629 | LMPLVVAVLENLDSVFAQDQ | SPAG9 |
| | | | [179, 198] | | | | [50, 69] |
| 9 | 1237 | TADELRMISSTFLNLPFQGI | TDRD1 | 26 | 2630 | SSSEVLASIENIIQDIITSL | SPO11 |
| | | | [807, 826] | | | | [43, 62] |
| 9 | 1238 | LQVRGAEASRLWASRLTDDS | TEKT5 | 26 | 2631 | FAFGNPVPRIKWRKVDGSLS | TAG-1 |
| | | | [100, 119] | | | | [262, 281] |
| 9 | 1239 | LVYERITIGTLFSVLHERAS | TEX14 | 26 | 2632 | NSGKLLDHVLIEMGYGLKPS | TDRD1 |
| | | | [324, 343] | | | | [431, 450] |
| 9 | 1240 | KQRFRGMLWFDLSLLPELVQ | TEX15 | 26 | 2633 | KAVVSGNYLEADVRLPKPYY | TEX14 |
| | | | [2085, 2104] | | | | [466, 485] |
| 9 | 1241 | PSTTMTKARKARRARALMEL | THEG | 26 | 2634 | NIHTSLAIAQKLMELKLGKI | TEX15 |
| | | | [112, 131] | | | | [351, 370] |
| 9 | 1242 | MDVLLAVFVERRQQYFSDLF | TPTE | 26 | 2635 | IYSIPRYVRDLKIQIEMEKK | TPTE |
| | | | [139, 158] | | | | [421, 440] |
| 9 | 1243 | DKKSENIASLGESLAMKEKT | TSGA10 | 26 | 2636 | RMEQMSNMTLMKETISTVEK | TSGA10 |
| | | | [278, 297] | | | | [158, 177] |
| 9 | 1244 | IDQMTQTASDVPVLQVIMHS | TSP50 | 27 | 2637 | KDTTIATILLKKVLLKHAKE | AKAP-3 |
| | | | [171, 190] | | | | [309, 328] |
| 9 | 1245 | TPESAPEELLAVQVELEPVN | TSPY1 | 27 | 2638 | MMAYSDTTMMSDDIDWLRSH | AKAP-4 |
| | | | [104, 123] | | | | [1, 20] |
| 9 | 1246 | FLLHHAFVDSIFEQWLRAHR | TYR | 27 | 2639 | GLHNYYDVVKNPMDLGTIKE | BRDT |
| | | | [386, 405] | | | | [305, 324] |
| 9 | 1247 | ELVRHHNMHQRNMTKLQLAL | WT1 | 27 | 2640 | KKTLQNLEEVLANTQKHLQE | CAGE1 |
| | | | [430, 449] | | | | [379, 398] |
| 9 | 1248 | GRAFSQSSNLSQHQRIHMRE | ZNF165 | 27 | 2641 | ITLSSIFTKDLVEKHNLPWS | CCDC62 |
| | | | [462, 481] | | | | [393, 412] |
| 10 | 1249 | AFARRPPLAELAALNLSGSA | 5T4 | 27 | 2642 | STKYQKVYGTAAVNSPVVSW | CTNNA2 |
| | | | [110, 129] | | | | [887, 906] |
| 10 | 1250 | LQNETYSALSPGKSEDVVLR | ACRBP | 27 | 2643 | VMWEVMTYGERPYWELSNHE | EPHA2 |
| | | | [510, 529] | | | | [806, 825] |
| 10 | 1251 | SNTYQLPDGSRVELTPMQRV | ACTL8 | 27 | 2644 | EGDQSGWVVPVKGYELAVTQ | FSIP1 |
| | | | [235, 254] | | | | [297, 316] |
| 10 | 1252 | VILAQLLSLSMGITYDDINK | ADAM2 | 27 | 2645 | VIYTQLMNPGLPDSALDINE | Glypican- |
| | | | [309, 328] | | | | 3 |
| | | | | | | | [177, 196] |
| 10 | 1253 | PFGGQKHIIHIKVKKLLFSK | ADAM29 | 27 | 2646 | PDGQVIWVNNTIINGSQVWG | gp100 |
| | | | [57, 76] | | | | [98, 117] |
| 10 | 1254 | LQTMKQEFLINLVKQKPQIT | AFP | 27 | 2647 | PEELVSMAERFKAHQQKREM | HAGE |
| | | | [545, 564] | | | | [614, 633] |
| 10 | 1255 | YDSDSWAEDLIVSALLLIQY | AKAP-3 | 27 | 2648 | HVERKILDLFQLNKLVAEEG | JARID1B |
| | | | [518, 537] | | | | [122, 141] |
| 10 | 1256 | DIMEAMLKRLVSALIGEEKE | AKAP-4 | 27 | 2649 | PKDVFDPLMIESKKAATVVL | KU-CT-1 |
| | | | [421, 440] | | | | [13, 32] |
| 10 | 1257 | AQRQDIAFAYQRRTKKELAS | ANXA2 | 27 | 2650 | ATTFIYNRAVKNTRKVAVSL | LIPI |
| | | | [66, 85] | | | | [138, 157] |
| 10 | 1258 | PNHHQLAFNYQELEHLQTVK | BRDT | 27 | 2651 | SVLQIPVSAASSSTLVSIFQ | MAGE-C1 |
| | | | [732, 751] | | | | [161, 180] |
| 10 | 1259 | PAQLAAQMLGKVSSIHSDQS | CABYR | 27 | 2652 | GVNVENRSQAGMFIYSNNRL | MORC1 |
| | | | [172, 191] | | | | [357, 376] |
| 10 | 1260 | SDEAKSIRDVPTLLGAKLDK | CAGE1 | 27 | 2653 | ILQIEDSEMSRVIRVSELSL | MPHOSPH1 |
| | | | [674, 693] | | | | [359, 378] |
| 10 | 1261 | QDWEKHFLDASTSKQSDWNG | CALR3 | 27 | 2654 | LKKEEFRKFKEHLKQMTLQL | NLRP4 |
| | | | [226, 245] | | | | [18, 37] |
| 10 | 1262 | TSKLQRLLAESRQMVTDLEL | CCDC62 | 27 | 2655 | LSDITEKAPKVKTLNLSKNK | NXF2 |
| | | | [631, 650] | | | | [288, 307] |
| 10 | 1263 | MIVKKEKLATAQFKINKKHE | CDCA1 | 27 | 2656 | AFKPAIEMQNSVPNKAFELK | NY-BR-1 |
| | | | [345, 364] | | | | [466, 485] |
| 10 | 1264 | AQLQRTPMSALVFPNKISTE | CT46 | 27 | 2657 | YNEDDSVVEKAVSVRPEAAP | NYD-TSPG |
| | | | [4, 23] | | | | [465, 484] |
| 10 | 1265 | VAEAKMTFKRFQANEERLEI | CTAGE2 | 27 | 2658 | HELAETEHENTVLRHNIERM | ODF2 |
| | | | [157, 176] | | | | [167, 186] |
| 10 | 1266 | MAATEISVLSEQFTKIKELE | CTCFL | 27 | 2659 | DKVNPKSSQRKLNWIPSFPT | PASD1 |
| | | | [1, 20] | | | | [10, 29] |
| 10 | 1267 | ADMADVMRLLSHLKIVEEAL | CTNNA2 | 27 | 2660 | EEETRGVISYQTLPRNMPSH | PEPP2 |
| | | | [141, 160] | | | | [427, 446] |
| 10 | 1268 | VEEDKPHYGLRAIKVDVVPR | CXorf48 | 27 | 2661 | IDVEVTRPEWYDFFIVSQAV | PIWIL1 |
| | | | [80, 99] | | | | [765, 784] |
| 10 | 1269 | SGLINSNTDNNLAVYDLSRD | CXorf61 | 27 | 2662 | AFDGSILYLPVKLQQVLELK | PIWIL2 |
| | | | [46, 65] | | | | [273, 292] |
| 10 | 1270 | VPVKGSRYAPNRRKSRRFIP | DBPC | 27 | 2663 | GSKITYIDYYRQQHKEIVTV | PIWIL3 |
| | | | [166, 185] | | | | [352, 371] |
| 10 | 1271 | FHLWKAENTLSKLLSTKLPY | DCAF12 | 27 | 2664 | LKKKRNDNSEAQLAHLIPEL | PIWIL4 |
| | | | [276, 295] | | | | [360, 379] |
| 10 | 1272 | KMTDNKTGEVLISENVVASI | DKKL1 | 27 | 2665 | PMQDIKMILKMVQLDSIEDL | PRAME |
| | | | [108, 127] | | | | [219, 238] |
| 10 | 1273 | TYYSSFYQPSLFPYYNNLYN | DMRT1 | 27 | 2666 | FSTQKVKMHIHSTNEVTRIY | PSMA |
| | | | [208, 227] | | | | [337, 356] |
| 10 | 1274 | VRTYWIIIELKHKAREKPYD | EpCAM | 27 | 2667 | PPEELHAAAYVFTNDGQQMR | SAGE1 |
| | | | [139, 158] | | | | [13, 32] |
| 10 | 1275 | PPQQSRVWKYEVTYRKKGDS | EPHA2 | 27 | 2668 | RQKMSEIFPLTEELWLEWLH | SART3 |
| | | | [460, 479] | | | | [135, 154] |
| 10 | 1276 | EQQKKIESYLHNHFIGEGMT | FAM46D | 27 | 2669 | ESKKKRKMAFEFDINSDSSE | SCP-1 |
| | | | [275, 294] | | | | [877, 896] |
| 10 | 1277 | PNTKAEMEMSLAEELNHGRQ | FATE1 | 27 | 2670 | SKDWKEKMERLNTSELLGEI | SOX-6 |
| | | | [6, 25] | | | | [158, 177] |
| 10 | 1278 | FERIMKYERLARILLQEIPI | FBXO39 | 27 | 2671 | HPFSMKPLLRRAMAYETLEQ | SPAG1 |
| | | | [289, 308] | | | | [517, 536] |
| 10 | 1279 | PVKGYELAVTQHQQLAEIDI | FSIP1 | 27 | 2672 | NEQLITQYEREKALRKHAEE | SPAG9 |
| | | | [306, 325] | | | | [82, 101] |
| 10 | 1280 | EAGLAEYLFDKLTLGGRVKE | FTHL17 | 27 | 2673 | AVPSNIQGIRNLVTDAKFVL | SPO11 |
| | | | [163, 182] | | | | [202, 221] |
| 10 | 1281 | EKDHIFSSYTAFGDLEVFLH | GASZ | 27 | 2674 | STGILSVRDATKITLAPSSA | TAG-1 |
| | | | [265, 284] | | | | [499, 518] |
| 10 | 1282 | SSFNPAALSRHMSSLSHISP | GATA-3 | 27 | 2675 | KEILPNGHVKVHFVDYGNIE | TDRD1 |
| | | | [390, 409] | | | | [785, 804] |
| 10 | 1283 | ARRDLKVFGNFPKLIMTQVS | Glypican- | 27 | 2676 | PPPSQELLDDIELLKQQQGS | TEX14 |
| | | | 3 | | | | [1331, 1350] |
| | | | [201, 220] | | | | |
| 10 | 1284 | SLIYRRRLMKQDFSVPQLPH | gp100 | 27 | 2677 | ENQIDTAFLSSTSKYEKLEK | TEX15 |
| | | | [613, 632] | | | | [1188, 1207] |
| 10 | 1285 | IKNIQSTTNTTIQIIQEQPE | HAGE | 27 | 2678 | KQKARRIYPSDFAVEILFGE | TPTE |
| | | | [90, 109] | | | | [520, 539] |
| 10 | 1286 | TYETAVALDTEIPNELPYND | HDAC1 | 27 | 2679 | QSQIALQEKESEIQLLKEHL | TSGA10 |
| | | | [313, 332] | | | | [580, 599] |
| 10 | 1287 | LDQIRQTIFENLKMLNHAPS | HDAC3 | 28 | 2680 | VFSHGSQKATDIMDAMLRKL | AKAP-3 |
| | | | [355, 374] | | | | [362, 381] |
| 10 | 1288 | LGQSFSFHSGNANIPSIYAN | IGFS11 | 28 | 2681 | NSSDDSEDERVKRLAKLQEQ | BRDT |
| | | | [341, 360] | | | | [410, 429] |
| 10 | 1289 | VNGSSENKPIRSSYFTFQLQ | IL13RA2 | 28 | 2682 | NIENYSTNALIQPVDTISIS | CAGE1 |
| | | | [214, 233] | | | | [97, 116] |
| 10 | 1290 | SIPVHLNSLPRLETLVAEVQ | JARID1B | 28 | 2683 | ELNDMVAVHQQQLLSWEEDR | CCDC62 |
| | | | [1048, 1067] | | | | [43, 62] |
| 10 | 1291 | EEVKLEAHIRVPSFAAGRVI | KOC1 | 28 | 2684 | NEFDNKIILDPMTFSEARFR | CTNNA2 |
| | | | [484, 503] | | | | [281, 300] |
| 10 | 1292 | LQEPSDLRAVLLINSKSYVS | KU-CT-1 | 28 | 2685 | IVSILDKLIRAPDSLKTLAD | EPHA2 |
| | | | [592, 611] | | | | [867, 886] |
| 10 | 1293 | EALFKKSAETLWNIQKDLIF | LDHC | 28 | 2686 | GSRSSNASLEVLSTEPGSFK | FSIP1 |
| | | | [313, 332] | | | | [23, 42] |
| 10 | 1294 | LQEVKILAQFYNDFVNISSI | LIPI | 28 | 2687 | FTDVSLYILGSDINVDDMVN | Glypican- |
| | | | [402, 421] | | | | 3 |
| | | | | | | | [149, 168] |
| 10 | 1295 | AREPVTKAEMLESVIKNYKH | MAGE-A1 | 28 | 2688 | RSYVPLAHSSSAFTITDQVP | gp100 |
| | | | [119, 138] | | | | [195, 214] |
| 10 | 1296 | LVQFLLFKYQMKEPITKAEI | MAGE-A10 | 28 | 2689 | LLMEAQLLQVSLPEIQELYQ | JARID1B |
| | | | [141, 160] | | | | [1349, 1368] |
| 10 | 1297 | TVRPADLTRVIMPLEQRSQH | MAGE-A11 | 28 | 2690 | PVIQLLALKTLGVIANDKES | KU-CT-1 |
| | | | [100, 119] | | | | [205, 224] |
| 10 | 1298 | PRKLLTQDLVQENYLEYRQV | MAGE-A12 | 28 | 2691 | FSFKLLNQLGMIEEPRLYEK | LIPI |
| | | | [242, 261] | | | | [376, 395] |
| 10 | 1299 | EEGPRMFPDLESEFQAAISR | MAGE-A2 | 28 | 2692 | QSPPEGENTHSPLQIVPSLP | MAGE-C1 |
| | | | [92, 111] | | | | [518, 537] |
| 10 | 1300 | GSVVGNWQYFFPVIFSKASS | MAGE-A3 | 28 | 2693 | EGDLEQTDTYLEALLKEDNL | MORC1 |
| | | | [137, 156] | | | | [937, 956] |
| 10 | 1301 | GSNPARYEFLWGPRALAETS | MAGE-A4 | 28 | 2694 | NMANSIKFSVWVSFFEIYNE | MPHOSPH1 |
| | | | [264, 283] | | | | [262, 281] |
| 10 | 1302 | KASDSLQLVFGIELMEVDPI | MAGE-A6 | 28 | 2695 | HYEEQQAWNITLRIFQKMDR | NLRP4 |
| | | | [153, 172] | | | | [62, 81] |
| 10 | 1303 | AEMLESVIKNYKRYFPVIFG | MAGE-A9 | 28 | 2696 | LLRRTKRDIVDSLSALPKTQ | NXF2 |
| | | | [132, 151] | | | | [459, 478] |
| 10 | 1304 | LNGASRRLELVFGLDLKEDN | MAGE-B1 | 28 | 2697 | ANILIDSGADINLVDVYGNT | NY-BR-1 |
| | | | [150, 169] | | | | [66, 85] |
| 10 | 1305 | NSATEEEIWEFLNMLGVYDG | MAGE-B2 | 28 | 2698 | TDINTLTRQKELLLQKLSTF | ODF2 |
| | | | [216, 235] | | | | [244, 263] |
| 10 | 1306 | EPRKLITQDLVKLKYLEYRQ | MAGE-B3 | 28 | 2699 | TQLLQQLYTSKAVSDEAVLT | PASD1 |
| | | | [243, 262] | | | | [178, 197] |
| 10 | 1307 | LNMLGIYDGKRHLIFGEPRK | MAGE-B4 | 28 | 2700 | KQDSTGMKLWKKRWFVLSDL | PEPP2 |
| | | | [224, 243] | | | | [178, 197] |
| 10 | 1308 | ARKIITEDLVQDKYVVYRQV | MAGE-B6 | 28 | 2701 | LFLPKRLQQKVTEVFSKTRN | PIWIL1 |
| | | | [328, 347] | | | | [168, 187] |
| 10 | 1309 | KQPITKAEMLTNVISRYTGY | MAGE-C1 | 28 | 2702 | HRPSERQDNHGMLLKGEILL | PIWIL2 |
| | | | [926, 945] | | | | [474, 493] |
| 10 | 1310 | PHSSPPYYEFLWGPRAHSES | MAGE-C2 | 28 | 2703 | PMGITMKPAEMIEVDGDANS | PIWIL3 |
| | | | [290, 309] | | | | [535, 554] |
| 10 | 1311 | LKSGSMRIGKDFILFTKKEE | MORC1 | 28 | 2704 | ASRRLRIALLYSHSELSNKA | PIWIL4 |
| | | | [103, 122] | | | | [135, 154] |
| 10 | 1312 | QKWREERDQLVAALEIQLKA | MPHOSPH1 | 28 | 2705 | RLSEGDVMHLSQSPSVSQLS | PRAME |
| | | | [1516, 1535] | | | | [333, 352] |
| 10 | 1313 | DNRPALGSTAPPVHNVTSAS | MUC-1 | 28 | 2706 | SGKIVIARYGKVFRGNKVKN | PSMA |
| | | | [943, 962] | | | | [197, 216] |
| 10 | 1314 | AFSHTQVIELERKFSHQKYL | NKX3.1 | 28 | 2707 | RHSSSKRRKSMSSWLDKQED | SAGE1 |
| | | | [130, 149] | | | | [55, 74] |
| 10 | 1315 | FKDPKRAMEAFNLVRESEQL | NLRP4 | 28 | 2708 | YVEIWQAYLDYLRRRVDFKQ | SART3 |
| | | | [315, 334] | | | | [417, 436] |
| 10 | 1316 | PSPGSTLSSSRSVELNGFMA | NR6A1 | 28 | 2709 | AVPSQTVSRNFTSVDHGISK | SCP-1 |
| | | | [190, 209] | | | | [814, 833] |
| 10 | 1317 | TMNKRYNVSQQALDLQNLRF | NXF2 | 28 | 2710 | IGGSLGRGSSLDILSSLNSP | SOX-6 |
| | | | [220, 239] | | | | [468, 487] |
| 10 | 1318 | IEVHNKASLTPLLLSITKRS | NY-BR-1 | 28 | 2711 | NWREKLSPIPAVPASVPLQA | SPAG1 |
| | | | [109, 128] | | | | [575, 594] |
| 10 | 1319 | SDFKDFIFDDMYIVQKYISN | NYD-TSPG | 28 | 2712 | AATSPSTNGASPVMDKPPEM | SPAG9 |
| | | | [226, 245] | | | | [855, 874] |
| 10 | 1320 | FKLENERLKASFAPMEDKLN | ODF2 | 28 | 2713 | RKEMEIMADSKMKAEIQALT | SPO11 |
| | | | [504, 523] | | | | [355, 374] |
| 10 | 1321 | RTGKDLGPAYSILGRYQTKT | ODF3 | 28 | 2714 | LVSSSAWSSALGSQTTFGPV | TAG-1 |
| | | | [78, 97] | | | | [19, 38] |
| 10 | 1322 | YFNHKSFWSLILSHPSGAVS | ODF4 | 28 | 2715 | YGNIEEVTADELRMISSTFL | TDRD1 |
| | | | [201, 220] | | | | [800, 819] |
| 10 | 1323 | IVNASEMDIQNVPLSEKIAE | OIP5 | 28 | 2716 | RVQRYGLHPDVNVYLGLTSE | TEX14 |
| | | | [179, 198] | | | | [530, 549] |
| 10 | 1324 | SIPQFPITSDSTISTLETPQ | PASD1 | 28 | 2717 | DSQSDLTLHSEIAYISKPGI | TEX15 |
| | | | [668, 687] | | | | [1550, 1569] |
| 10 | 1325 | MDEAKILKSLHHPNIVGYRA | PBK | 28 | 2718 | GVKTPSQKRYVAYFAQVKHL | TPTE |
| | | | [83, 102] | | | | [384, 403] |
| 10 | 1326 | YNVTSDYAVHPMSPVGRTSR | PEPP2 | 29 | 2719 | VSALLLIQYHLAQGGRADAR | AKAP-3 |
| | | | [128, 147] | | | | [529, 548] |
| 10 | 1327 | RDWGLSFDSNLLSFSGRILQ | PIWIL1 | 29 | 2720 | KPGDDIVLMAQALEKLFMQK | BRDT |
| | | | [439, 458] | | | | [110, 129] |
| 10 | 1328 | RINLKNTSFITSQELNWVKE | PIWIL2 | 29 | 2721 | EERNKHLEDLIRKPREKARK | CAGE1 |
| | | | [572, 591] | | | | [730, 749] |
| 10 | 1329 | DVSHKLLRIETAYDFIKRTS | PIWIL3 | 29 | 2722 | NHPKVDIKREKNQKSLFKDQ | CCDC62 |
| | | | [283, 302] | | | | [337, 356] |
| 10 | 1330 | PGFAISVSYFERKLLFSADV | PIWIL4 | 29 | 2723 | DGVRDIRKAVLMIRTPEELE | CTNNA2 |
| | | | [244, 263] | | | | [618, 637] |
| 10 | 1331 | KLPTLAKFSPYLGQMINLRR | PRAME | 29 | 2724 | KEVPVAIKTLKAGYTEKQRV | EPHA2 |
| | | | [245, 264] | | | | [639, 658] |
| 10 | 1332 | LVNYNLWIEKVTQLEGRPFN | PRSS55 | 29 | 2725 | VVMVDREKKRLVELLKDLDE | FSIP1 |
| | | | [288, 307] | | | | [269, 288] |
| 10 | 1333 | LKKEGWRPRRTILFASWDAE | PSMA | 29 | 2726 | YQLTARLNMEQLLQSASMEL | Glypican- |
| | | | [405, 424] | | | | 3 |
| | | | | | | | [81, 100] |
| 10 | 1334 | YVMELPKLKLSGVVRLSSYS | RAGE-1 | 29 | 2727 | PSAAELQDLLDVSFEFDVEL | JARID1B |
| | | | [345, 364] | | | | [885, 904] |
| 10 | 1335 | FGQNYERIFILLEEVQGSMK | SAGE1 | 29 | 2728 | LVRGEYGRAWNEVMLQNDSR | KU-CT-1 |
| | | | [838, 857] | | | | [815, 834] |
| 10 | 1336 | EKALNAGFIQATDYVEIWQA | SART3 | 29 | 2729 | SLTDSESLIESEPLFTYTLD | MAGE-C1 |
| | | | [404, 423] | | | | [890, 909] |
| 10 | 1337 | ESKQLNVYEIKVNKLELELE | SCP-1 | 29 | 2730 | MKRSSSLPSWKSLLNVPMED | MORC1 |
| | | | [632, 651] | | | | [764, 783] |
| 10 | 1338 | GEVQNMLEGVGVDINKALLA | SCP3a | 29 | 2731 | LKLGIKHQSVAFTKLNNASS | MPHOSPH1 |
| | | | [68, 87] | | | | [330, 349] |
| 10 | 1339 | FTGTPDPSRSIFKPFIFVDD | SCRN1 | 29 | 2732 | DLRRNGVVDADIPALLGTKI | NLRP4 |
| | | | [294, 313] | | | | [418, 437] |
| 10 | 1340 | YESTSAHIIEETEYVKKIRT | se57-1 | 29 | 2733 | PPEKPSAFEPAIEMQKSVPN | NY-BR-1 |
| | | | [23, 42] | | | | [698, 717] |
| 10 | 1341 | RKRKQLHFFDSRLKDLKLGT | SLCO6A1 | 29 | 2734 | EQLHVQLADKDLYVAEALST | ODF2 |
| | | | [348, 367] | | | | [421, 440] |
| 10 | 1342 | TGGATVAEARVYRDARGRAS | SOX-6 | 29 | 2735 | VEQYGPQENVHMFVDSDSTY | PASD1 |
| | | | [597, 616] | | | | [247, 266] |
| 10 | 1343 | IAKPNNAYEFGQIINALSTR | SPAG1 | 29 | 2736 | DRPLTKINSVKLNSLPSEYE | PEPP2 |
| | | | [800, 819] | | | | [335, 354] |
| 10 | 1344 | GYRNKIYVVQPKAMKIEKSF | SPAG9 | 29 | 2737 | GVGDGQLKTLVNYEVPQFLD | PIWIL1 |
| | | | [1063, 1082] | | | | [703, 722] |
| 10 | 1345 | DIMRDRIEQVARSISRLTDV | SPATA19 | 29 | 2738 | SINLTLTKWYSRVVFQMPHQ | PIWIL2 |
| | | | [134, 153] | | | | [763, 782] |
| 10 | 1346 | DVLDRHRESLLAALRRGGRE | SPO11 | 29 | 2739 | LAFIVVKKRINTRFFLKHGS | PIWIL3 |
| | | | [14, 33] | | | | [756, 775] |
| 10 | 1347 | DNDHNRRIQVEHPQMTFGRL | SSX-1 | 29 | 2740 | ASSSNGFLGTSRISTNDKYG | PIWIL4 |
| | | | [85, 104] | | | | [40, 59] |
| 10 | 1348 | PNRGNQVQRPQMTFGRLQGI | SSX-3 | 29 | 2741 | SLSGVMLTDVSPEPLQALLE | PRAME |
| | | | [88, 107] | | | | [355, 374] |
| 10 | 1349 | HRLRERKQLVVYEEISDPEE | SSX-4 | 29 | 2742 | MPEGDLVYVNYARTEDFFKL | PSMA |
| | | | [166, 185] | | | | [169, 188] |
| 10 | 1350 | QIPEKMQKAFDDIAKYFSEK | SSX-5 | 29 | 2743 | TNDGQQMRSDEVNLVATGHQ | SAGE1 |
| | | | [16, 35] | | | | [25, 44] |
| 10 | 1351 | LQIEEEKNKQRQLRLAFEEQ | SYCE1 | 29 | 2744 | AHGTVKDLRLVTNRAGKPKG | SART3 |
| | | | [142, 161] | | | | [823, 842] |
| 10 | 1352 | GSIPGFLISSGMSSHKQGHT | TAF7L | 29 | 2745 | ESNKARAAHSFVVTEFETTV | SCP-1 |
| | | | [295, 314] | | | | [365, 384] |
| 10 | 1353 | GLSYRWLLNEFPNFIPTDGR | TAG-1 | 29 | 2746 | LNSPALFGDQDTVMKAIQEA | SOX-6 |
| | | | [163, 182] | | | | [484, 503] |
| 10 | 1354 | IISDVLIDEHLVLKSASPHK | TDRD1 | 29 | 2747 | LAITAPKDLPMFLSNKLEGD | SPAG1 |
| | | | [883, 902] | | | | [829, 848] |
| 10 | 1355 | FQAENTIMLLERSIMAKEGP | TEKT5 | 29 | 2748 | MSERVSGLAGSIYREFERLI | SPAG9 |
| | | | [368, 387] | | | | [20, 39] |
| 10 | 1356 | WKRLGWSESSRIIVLDQSDL | TEX14 | 29 | 2749 | SGPSSKIRTREAAPSVAPSG | TAG-1 |
| | | | [1476, 1495] | | | | [697, 716] |
| 10 | 1357 | TKREKNSYYVFLKYKRQVNE | TEX15 | 29 | 2750 | EIIPLNRIYHLNRNIDLFPP | TDRD1 |
| | | | [1773, 1792] | | | | [355, 374] |
| 10 | 1358 | RSSLEYRASSRLKELAAPKI | THEG | 29 | 2751 | DIPWKGLDGSVVKKAVVSGN | TEX14 |
| | | | [221, 240] | | | | [453, 472] |
| 10 | 1359 | QKRYVAYFAQVKHLYNWNLP | TPTE | 29 | 2752 | TPKKVEMQRSLPGSLLPLEN | TEX15 |
| | | | [390, 409] | | | | [2384, 2403] |
| 10 | 1360 | ENELDSAHSEIELLRSQMAN | TSGA10 | 29 | 2753 | HLFHQKRQLEKLIRRRVSEN | TPTE |
| | | | [540, 559] | | | | [207, 226] |
| 10 | 1361 | DIGLLKLKQELKYSNYVRPI | TSP50 | 30 | 2754 | SFYANRLTNLVIAMARKEIN | AKAP-3 |
| | | | [206, 225] | | | | [125, 144] |
| 10 | 1362 | SNPYFQNKVITKEYLVNITE | TSPY1 | 30 | 2755 | SVFPKTSISPLNVVQGASVN | BRDT |
| | | | [207, 226] | | | | [179, 198] |
| 10 | 1363 | PAFLPWHRLFLLRWEQEIQK | TYR | 30 | 2756 | LSKKEEEVERLQQLKKELEK | CAGE1 |
| | | | [205, 224] | | | | [445, 464] |
| 10 | 1364 | AQYRIHTHGVFRGIQDVRRV | WT1 | 30 | 2757 | QAFLRHPDVAATRANRDYVF | CTNNA2 |
| | | | [284, 303] | | | | [225, 244] |
| 10 | 1365 | EHGQEIFQKKVSPPGPALNV | ZNF165 | 30 | 2758 | LDDLAPDTTYLVQVQALTQE | EPHA2 |
| | | | [142, 161] | | | | [494, 513] |
| 11 | 1366 | DERQNRSFEGMVVAALLAGR | 5T4 | 30 | 2759 | LEMRIKLWEEIKSAKYSEAW | FSIP1 |
| | | | [188, 207] | | | | [144, 163] |
| 11 | 1367 | TPTAKAWKYMEEEILGFGKS | ACRBP | 30 | 2760 | NNYPSLTPQAFEFVGEFFTD | Glypican- |
| | | | [340, 359] | | | | 3 |
| | | | | | | | [132, 151] |
| 11 | 1368 | WEGSNRNFSVWLGASVVAHL | ACTL8 | 30 | 2761 | PDDWDNRTSYLHSPFSTGRS | JARID1B |
| | | | [328, 347] | | | | [1316, 1335] |
| 11 | 1369 | VLIAIMVKVNFQRKKWRTED | ADAM2 | 30 | 2762 | ISELKFQLKSNVIPIGHVKK | KU-CT-1 |
| | | | [701, 720] | | | | [773, 792] |
| 11 | 1370 | ERNDSKLLEDLYVIVNIVDS | ADAM29 | 30 | 2763 | ERTQSTFEGFAQSPLQIPVS | MAGE-C1 |
| | | | [215, 234] | | | | [219, 238] |
| 11 | 1371 | QITEEQLEAVIADFSGLLEK | AFP | 30 | 2764 | LPSIPLGTMSTISPSKNEKE | MORC1 |
| | | | [562, 581] | | | | [529, 548] |
| 11 | 1372 | IDGHMSGQMVEHLMNSVMKL | AKAP-3 | 30 | 2765 | NASSRSHSIFTVKILQIEDS | MPHOSPH1 |
| | | | [661, 680] | | | | [346, 365] |
| 11 | 1373 | QVASDMMVSLMKTLKVHSSG | AKAP-4 | 30 | 2766 | FFKDPKRAMEAFNLVRESEQ | NLRP4 |
| | | | [339, 358] | | | | [314, 333] |
| 11 | 1374 | KELASALKSALSGHLETVIL | ANXA2 | 30 | 2767 | VIEVHNKASLTPLLLSITKR | NY-BR-1 |
| | | | [81, 100] | | | | [108, 127] |
| 11 | 1375 | ELEHLQTVKNISPLQILPPS | BRDT | 30 | 2768 | APMEDKLNQAHLEVQQLKAS | ODF2 |
| | | | [743, 762] | | | | [516, 535] |
| 11 | 1376 | AQLEENAKYSSVYMEAEATA | CABYR | 30 | 2769 | LELMMDHLQKQPNTLRHVVI | PASD1 |
| | | | [366, 385] | | | | [402, 421] |
| 11 | 1377 | SGEMLKFTEKSLAKSIAKES | CAGE1 | 30 | 2770 | PAQTVHYRPINLSSSENKIV | PEPP2 |
| | | | [197, 216] | | | | [360, 379] |
| 11 | 1378 | GTIFDNFLITDDEEYADNFG | CALR3 | 30 | 2771 | FRLTSRPQWALYQYHIDYNP | PIWIL1 |
| | | | [310, 329] | | | | [119, 138] |
| 11 | 1379 | NFNVENSQELIQMYDSKMEE | CCDC62 | 30 | 2772 | LVSMFRGLGIETVSKTPLKR | PIWIL2 |
| | | | [300, 319] | | | | [71, 90] |
| 11 | 1380 | NYKEKMKDTVQKLKNARQEV | CDCA1 | 30 | 2773 | LLNAMPLHSWLILYSRSSHR | PIWIL3 |
| | | | [253, 272] | | | | [501, 520] |
| 11 | 1381 | TERERMENIDSTILSPKQIK | CT46 | 30 | 2774 | EKQLIGLIVLTRYNNRTYSI | PIWIL4 |
| | | | [228, 247] | | | | [294, 313] |
| 11 | 1382 | HSEQNELMADISKRIQSLED | CTAGE2 | 30 | 2775 | KYAGESFPGIYDALFDIESK | PSMA |
| | | | [129, 148] | | | | [699, 718] |
| 11 | 1383 | EELERTIHSYQGQIISHEKK | cTAGE5 | 30 | 2776 | INDDIKYQLMKEVRRFGQNY | SAGE1 |
| | | | [440, 459] | | | | [823, 842] |
| 11 | 1384 | EESEKYILTLQTVHFTSEAV | CTCFL | 30 | 2777 | HVDLIRLLRLEGELTKVRMA | SART3 |
| | | | [73, 92] | | | | [115, 134] |
| 11 | 1385 | SLEERLESIISGAALMADSS | CTNNA2 | 30 | 2778 | GSTLKFGAIRKMREDRWAVI | SCP-1 |
| | | | [302, 321] | | | | [940, 959] |
| 11 | 1386 | SIYFSSDVVTGNVPLKVGQK | CXorf48 | 30 | 2779 | GATVAEARVYRDARGRASSE | SOX-6 |
| | | | [56, 75] | | | | [599, 618] |
| 11 | 1387 | ALIVFWKYRRFQRNTGEMSS | CXorf61 | 30 | 2780 | GLQLANDSVNRLSRILMELD | SPAG1 |
| | | | [14, 33] | | | | [553, 572] |
| 11 | 1388 | NPATAVSGTPAPPARSQADK | DBPC | 30 | 2781 | ILENTQLLETKNALNIVKND | SPAG9 |
| | | | [68, 87] | | | | [414, 433] |
| 11 | 1389 | ETWRNYFSDIDFFPNAVYTH | DCAF12 | 30 | 2782 | EYQNGDGFGYLLSFRRQGST | TAG-1 |
| | | | [405, 424] | | | | [737, 756] |
| 11 | 1390 | EVLISENVVASIQPAEGSFE | DKKL1 | 30 | 2783 | SIKIVDILEEEVVTFAVEVE | TDRD1 |
| | | | [116, 135] | | | | [409, 428] |
| 11 | 1391 | PQYSMALAADSASGEVGNPL | DMRT1 | 30 | 2784 | SSTAQENLALETSSPIEEDF | TEX14 |
| | | | [229, 248] | | | | [1093, 1112] |
| 11 | 1392 | HKAREKPYDSKSLRTALQKE | EpCAM | 30 | 2785 | SYGENIVELSSSDSSLLLKD | TEX15 |
| | | | [150, 169] | | | | [1421, 1440] |
| 11 | 1393 | MAAGYTAIEKVVQMTNDDIK | EPHA2 | 30 | 2786 | VFDGLPLYDDVKVQFFYSNL | TPTE |
| | | | [926, 945] | | | | [466, 485] |

TABLE 25B
Hotspot Sequences and corresponding TAA

| | | | Source | | | | Source |
|---|---|---|---|---|---|---|---|
| | | | Antigen(s) | | | | Antigen(s) |
| | SEQ | | [AA posi- | | SEQ | | [AA posi- |
| Cy- | ID | | tion in | Cy- | ID | | tion in |
| cle | NO | Sequence | Antigen] | cle | NO | Sequence | Antigen] |
| 28 | 5432 | SVYADQVNIDYLMNRPQNLR | AKAP4 | 11 | 5682 | SQVAGRLIIRAEELAQMWKV | Ropporin-1A |
| | | | [157, 176] | | | | [77-96] |
| 24 | 5433 | FTSSAMSSFNRHMKTHTSEK | CTCFL | 11 | 5683 | YPEEIVRYYSPGYSDTLLQR | SPAG6 |
| | | | [264, 283] | | | | [481-500] |
| 31 | 5434 | KQQVFIDVINKLKENVEELI | CAGE1 | 11 | 5684 | ESTEGSRSRSRSLDIQPSSE | SPAG8 |
| | | | [346, 365] | | | | [5-24] |
| 10 | 5435 | KKIEVYLRLHRHAYPEQRQD | DPPA2 | 11 | 5685 | KSLPNENFQSLYNKELPVHI | TDRD4 |
| | | | [114, 133] | | | | [903-922] |
| 15 | 5436 | GSKLGRRAKPEGALQNNDGL | EpCAM | 11 | 5686 | FQQQQHQILATPLQNLQVLA | TTK |
| | | | [75, 94] | | | | [491-510] |
| 31 | 5437 | SDTKDYFMSKTLGIGALKAP | FSIP1 | 11 | 5687 | ASAAARGFPLRTLNDWFSSM | WBP2NL |
| | | | [516, 535] | | | | [133-152] |
| 16 | 5438 | KLHNINRPLTMKKEGIQTRN | GATA-3 | 11 | 5688 | RTYLSQKSLQAHIKRAHKRA | ZNF645 |
| | | | [347, 366] | | | | [122-141] |
| 20 | 5439 | SVMDLVGSILKNLARVHPVS | LDHC | 12 | 5689 | KWVGESERQLRLLFDQAYQM | ATAD2 |
| | | | [255, 274] | | | | [504-523] |
| 22 | 5440 | QEESFSPTAMDAIFGSLSDE | MAGE-A11 | 12 | 5690 | KVFTHQGKVALYGKLVQSAQ | CASC5 |
| | | | [176, 195] | | | | [2009-2028] |
| 14 | 5441 | EDSVFAHPRKLLMQDLVQEN | MAGE-A2 | 12 | 5691 | KQHREEDEVDSVLLSASKIL | CCDC110 |
| | | | [235, 254] | | | | [5-24] |
| 18 | 5442 | REALDEKVAELVRFLLRKYQ | MAGE-A8 | 12 | 5692 | ATYLWWVNNQSLPVSPRLQL | CEA |
| | | | [109, 128] | | | | [174-193] |
| 31 | 5443 | LQRPVSSFFSYTLASLLQSS | MAGE-C1 | 12 | 5693 | LLKQQEEQTRVALLEQQMQA | CEP55 |
| | | | [775, 794] | | | | [339-358] |
| 31 | 5444 | ESLVEKTPDEAASLVEGTSD | NY-BR-1 | 12 | 5694 | SDLDFPTQVIPLKTLNAVAS | EZH2 |
| | | | [262, 281] | | | | [87-106] |
| 28 | 5445 | DWNLYWRTSSFAMTEHNSVK | NYD-TSPG | 12 | 5695 | SYGERHLDDLSLKILREDKK | HORMAD2 |
| | | | [120, 139] | | | | [57-76] |
| 3 | 5446 | SARVASRSAGRGDGQEAPDV | PAGE4 | 12 | 5696 | LRDAVVIEQSSSLNEASSGL | hTERT |
| | | | [2, 21] | | | | [786-805] |
| 31 | 5447 | YLTGLTDKMRNDFNVMKDLA | PIWIL1 | 12 | 5697 | PPMQLGFPSLHSFIKEHSLQ | KIF20A |
| | | | [388, 407] | | | | [511-530] |
| 31 | 5448 | ENPAMQEKKRSSIWQFFSRL | SPAG9 | 12 | 5698 | SLQARLFPGLAIKIQRSNGL | MCAK |
| | | | [540, 559] | | | | [6-25] |
| 32 | 5449 | NEQDLVREEAQKMSSLLPTM | SPAG9 | 12 | 5699 | TRFFSRITKANVDLLPRGAP | MSLN |
| | | | [953, 972] | | | | [138-157] |
| 18 | 5450 | GFSYEQDPTLADPEAVARAW | TSP50 | 12 | 5700 | MWKVVNLPTDLFNSVMNVGR | Ropporin-1A |
| | | | [105, 124] | | | | [93-112] |
| 1 | 5451 | RQLRLLFDQAYQMRPSIIFF | ATAD2 | 12 | 5701 | AVTNTLPVLLSLYMSTESSE | SPAG6 |
| | | | [511-530] | | | | [375-394] |
| 1 | 5452 | GVVFLALSAQLLQARLMKEE | BAGE-3 | 12 | 5702 | YWPLRGKREAMLEMLLQHQI | SPAG8 |
| | | | [4-23] | | | | [342-361] |
| 1 | 5453 | RLLFSSSAAFAKFEITLFLS | CASC5 | 12 | 5703 | KFEDGIWYRAKVIGLPGHQE | TDRD4 |
| | | | [2266-2285] | | | | [736-755] |
| 1 | 5454 | QQLESFQALRMQTLQNVSMV | CCDC110 | 12 | 5704 | EDLSGRELTIDSIMNKVRDI | TTK |
| | | | [61-80] | | | | [4-23] |
| 1 | 5455 | AQNTTYLWWVNGQSLPVSPR | CEA | 12 | 5705 | NEGPPAGYRASPAGSGARPQ | WBP2NL |
| | | | [527-546] | | | | [266-285] |
| 1 | 5456 | KKRSEELLSQVQFLYTSLLK | CEP55 | 12 | 5706 | RDHLSYIPPEQHTMVSLPSV | ZNF645 |
| | | | 322-341] | | | | [174-193] |
| 1 | 5457 | HPLLGVSATLNSVLNSNAIK | DKK1 | 13 | 5707 | VLRMTRARRSQVEQQQLITV | ATAD2 |
| | | | [24-43] | | | | [1293-1312] |
| 1 | 5458 | TGEELFFDYRYSQADALKYV | EZH2 | 13 | 5708 | TIREFFILLQVHILIQKPRQ | CASC5 |
| | | | [718-737] | | | | [1895-1914] |
| 1 | 5459 | MSWAGASTYRPRPARYVEPP | GAGE-2 | 13 | 5709 | AKIQYLQNYLKESVQIQKKV | CCDC110 |
| | | | [1-20] | | | | [426-445] |
| 1 | 5460 | EKRYLRMAVLTLYTDPMGSE | HORMAD2 | 13 | 5710 | TPIISPPDSSYLSGANLNLS | CEA |
| | | | [95-114] | | | | [595-614] |
| 1 | 5461 | AEANAVATMPVALLADSPAA | HSPB9 | 13 | 5711 | KLDRQHVQHQLHVILKELRK | CEP55 |
| | | | [24-43] | | | | [367-386] |
| 1 | 5462 | SFFYVTETTFQKNALFFYRK | hTERT | 13 | 5712 | KVMMVNGDHRIGIFAKRAIQ | EZH2 |
| | | | [559-578] | | | | [698-717] |
| 1 | 5463 | ANIRFSIWISFFEIYNELLY | KIF20A | 13 | 5713 | GFHSMKVKVMTEATKVIDLE | HORMAD2 |
| | | | [295-314] | | | | [226-245] |
| 1 | 5464 | KAQNASKGIYAMASRDVFLL | MCAK | 13 | 5714 | DTDPRALVQLLAQHSSPWQV | hTERT |
| | | | [365-384] | | | | [442-461] |
| 1 | 5465 | SQQNVSMDLATFMKLRTDAV | MSLN | 13 | 5715 | VGQASFFNLTVKEMVKDVLK | KIF20A |
| | | | [520-539] | | | | [131-150] |
| 1 | 5466 | DEERELEKLFQLGPPSPVKM | PTTG-1 | 13 | 5716 | FQIILRAKGRMHGKFSLVDL | MCAK |
| | | | [150-169] | | | | [474-493] |
| 1 | 5467 | STFQFLYTYIAKVDGEISAS | Ropporin-1A | 13 | 5717 | DVLYPKARLAFQNMNGSEYF | MSLN |
| | | | [159-178] | | | | [482-501] |
| 1 | 5468 | QNIETLQNAGVMSLLRTLLL | SPAG6 | 13 | 5718 | EDFDPGVKEAAAWALRYIAR | SPAG6 |
| | | | [32-51] | | | | [135-154] |
| 1 | 5469 | FRHGHAGLLTMQLKSPMPSS | SPAG8 | 13 | 5719 | ATAVNTRQRYYPMAGYIKED | TDRD4 |
| | | | [309-328] | | | | [77-96] |
| 1 | 5470 | KMKSLEKISYVYMKRKYEAM | SSX-7 | 13 | 5720 | VSDEKSSELIITDSITLKNK | TTK |
| | | | [39-58] | | | | [340-359] |
| 1 | 5471 | GERVDVSKYLIKKGLALRER | TDRD4 | 13 | 5721 | PQRSEGSNVFSGRKTGTLFL | WBP2NL |
| | | | [1087-1106] | | | | [34-53] |
| 1 | 5472 | KKFAFVHISFAQFELSQGNV | TTK | 13 | 5722 | IKRAHKRARKQVTSASLEKV | ZNF645 |
| | | | [140-159] | | | | [134-153] |
| 1 | 5473 | PKPEEKRFLLEEPMPFFYLK | URLC10 | 14 | 5723 | ASLADVDPMQLDSSVRFDSV | ATAD2 |
| | | | [95-114] | | | | [409-428] |
| 1 | 5474 | RTLNDWFSSMGIYVITGEGN | WBP2NL | 14 | 5724 | EITGMNTLLSAPIHTQMQQK | CASC5 |
| | | | [143-162] | | | | [131-150] |
| 1 | 5475 | IPPEQHTMVSLPSVQHMLQE | ZNF645 | 14 | 5725 | KDKERQPFLVKQGSIISENE | CCDC110 |
| | | | [180-199] | | | | [393-412] |
| 2 | 5476 | SRQDQIHSSIVSTLLALMDG | ATAD2 | 14 | 5726 | ERVDGNRQIIGYVIGTQQAT | CEA |
| | | | [542-561] | | | | [71-90] |
| 2 | 5477 | TALDVHFVSTLEPLSNAVKR | BAGE-3 | 14 | 5727 | EKVAASPKSPTAALNESLVE | CEP55 |
| | | | [37-56] | | | | [420-439] |
| 2 | 5478 | WEQSLFSTTKPLFSSGQFSM | CASC5 | 14 | 5728 | EWSGAEASMFRVLIGTYYDN | EZH2 |
| | | | [717-736] | | | | [431-450] |
| 2 | 5479 | LKFHSRVPRYTLSFLDQTKH | CCDC110 | 14 | 5729 | VKVMTEATKVIDLENNLFRE | HORMAD2 |
| | | | [371-390] | | | | [232-251] |
| 2 | 5480 | AQYSWFVNGTFQQSTQELFI | CEA | 14 | 5730 | EHRLREEILAKFLHWLMSVY | hTERT |
| | | | [267-286] | | | | [533-552] |
| 2 | 5481 | LTDKERHALLEKIRVLEAEK | CEP55 | 14 | 5731 | ERGIGQATHRFTFSQIFGPE | KIF20A |
| | | | [51-70] | | | | [111-130] |
| 2 | 5482 | STLDGYSRRTTLSSKMYHTK | DKK1 | 14 | 5732 | EYTLNTLRYADRVKELSPHS | MCAK |
| | | | [163-182] | | | | [573-592] |
| 2 | 5483 | PRKFPSDKIFEAISSMFPDK | EZH2 | 14 | 5733 | EDIRKWNVTSLETLKALLEV | MSLN |
| | | | [215-234] | | | | [382-401] |
| 2 | 5484 | KEPINVQVGFVSTGFHSMKV | HORMAD2 | 14 | 5734 | AWALRYIARHNAELSQAVVD | SPAG6 |
| | | | [213-232] | | | | [146-165] |
| 2 | 5485 | EELVVQVDGQWLMVTGQQQL | HSPB9 | 14 | 5735 | LERSASTDKTLLNSSAVMLD | TDRD4 |
| | | | [66-85] | | | | [125-144] |
| 2 | 5486 | QQVWKNPTFFLRVISDTASL | hTERT | 14 | 5736 | ELRNLKSVQNSHFKEPLVSD | TTK |
| | | | [1023-1042] | | | | [323-342] |
| 2 | 5487 | DSMEKVKVYLAVAPLLPSEL | KIF20A | 14 | 5737 | ESTAAQAPENEASLPSASSS | WBP2NL |
| | | | [60-79] | | | | [286-305] |
| 2 | 5488 | ETASNEVVYRFTARPLVQTI | MCAK | 14 | 5738 | PIQWETVSIFTRKHGNLTVD | ZNF645 |
| | | | [317-336] | | | | [222-241] |
| 2 | 5489 | DLPGRFVAESAEVLLPRLVS | MSLN | 15 | 5739 | YQMRPSIIFFDEIDGLAPVR | ATAD2 |
| | | | [191-210] | | | | [521-540] |
| 2 | 5490 | ESNLLQSPSSILSTLDVELP | PTTG-1 | 15 | 5740 | KNDMDITKSYTIEINHRPLL | CASC5 |
| | | | [175-194] | | | | [895-914] |
| 2 | 5491 | IRVQPQDLIQWAADYFEALS | Ropporin-1A | 15 | 5741 | RPLASDLKGYFKVKDRTLKH | CCDC110 |
| | | | [26-45] | | | | [813-832] |
| 2 | 5492 | VKEAAAWALRYIARHNAELS | SPAG6 | 15 | 5742 | GIQNELSVDHSDPVILNVLY | CEA |
| | | | [141-160] | | | | [394-413] |
| 2 | 5493 | MQDGSESFFFRHGHRGLLTM | SPAG8 | 15 | 5743 | KSETTLEKLKGEIAHLKTSV | CEP55 |
| | | | [300-319] | | | | [22-41] |
| 2 | 5494 | RLQRIFPKIMPKKPAEEGND | SSX-7 | 15 | 5744 | VEDETVLHNIPYMGDEVLDQ | EZH2 |
| | | | [103-122] | | | | [122-141] |
| 2 | 5495 | LNAAMNIARALQLSPSLRTY | TDRD4 | 15 | 5745 | ITYLRGLFPESSYGERHLDD | HORMAD2 |
| | | | [237-256] | | | | [46-65] |
| 2 | 5496 | LYYMTYGKTPFQQIINQISK | TTK | 15 | 5746 | REKRAERLTSRVKALFSVLN | hTERT |
| | | | [724-743] | | | | [647-666] |
| 2 | 5497 | LVVALPRVWTDANLTARQRD | URLC10 | 15 | 5747 | KLNILKESLTSFYQEEIQER | KIF20A |
| | | | [8-27] | | | | [625-644] |
| 2 | 5498 | KLVFRNGDAIEFAQLMVKAA | WBP2NL | 15 | 5748 | ESALAQQAKHFSALRDVIKA | MCAK |
| | | | [114-133] | | | | [684-703] |
| 2 | 5499 | ELSLSLPFPIQWETVSIFTR | ZNF645 | 15 | 5749 | EDLKALSQQNVSMDLATFMK | MSLN |
| | | | [214-233] | | | | [514-533] |
| 3 | 5500 | KKSQNYNIFQLENLYAVISQ | ATAD2 | 15 | 5750 | PPNILKHVVGQFSKVLPHDS | SPAG6 |
| | | | [1342-1361] | | | | [425-444] |
| 3 | 5501 | FVQNTLTKLLKDRRKMQTVQ | BAGE-3 | 15 | 5751 | KLAYIEPYKRTMQWSKEAKE | TDRD4 |
| | | | [82-101] | | | | [792-811] |
| 3 | 5502 | EHTTGQLTTMNRQIAVKVEK | CASC5 | 15 | 5752 | SGTVNQIMMMANNPEDWLSL | TTK |
| | | | [814-833] | | | | [49-68] |
| 3 | 5503 | SIEMEAMKTNILLIQDEKEM | CCDC110 | 16 | 5753 | KEERTKFFEDLILKQAAKPP | ATAD2 |
| | | | [568-587] | | | | [926-945] |
| 3 | 5504 | AYSGREIIYPNASLLIQNII | CEA | 16 | 5754 | QAPPSSLLVHKLIFQYVEEK | CASC5 |
| | | | [94-113] | | | | [2190-2209] |
| 3 | 5505 | LRDQLKARYSTTTLLEQLEE | CEP55 | 16 | 5755 | NLKSKMKPLIFTTQSLIQKV | CCDC110 |
| | | | [87-106] | | | | [454-473] |
| 3 | 5506 | LNSVLNSNAIKNLPPPLGGA | DKK1 | 16 | 5756 | FVSNLATGRNNSIVKSITVS | CEA |
| | | | [33-52] | | | | [656-675] |
| 3 | 5507 | KTLNAVASVPIMYSWSPLQQ | EZH2 | 16 | 5757 | RDQLKARYSTTTLLEQLEET | CEP55 |
| | | | [99-118] | | | | [88-107] |
| 3 | 5508 | LIRKLYILMQDLEPLPNNVV | HORMAD2 | 16 | 5758 | SFLFNLNNDFVVDATRKGNK | EZH2 |
| | | | [160-179] | | | | [664-683] |
| 3 | 5509 | RVSYRMSQKVHRKMLPSNLS | HSPB9 | 16 | 5759 | VTEMYQFKFKYTKEGATMDF | HORMAD2 |
| | | | [92-111] | | | | [116-135] |
| 3 | 5510 | RVKALFSVLNYERARRPGLL | hTERT | 16 | 5760 | FQKNRLFFYRKSVWSKLQSI | hTERT |
| | | | [657-676] | | | | [568-587] |
| 3 | 5511 | STYDETLHVAKFSAIASQLV | KIF20A | 16 | 5761 | KQIRQEEMKKLSLLNGGLQE | KIF20A |
| | | | [489-508] | | | | [215-234] |
| 3 | 5512 | ILRAKGRMHGKFSLVDLAGN | MCAK | 16 | 5762 | RAKGRMHGKFSLVDLAGNER | MCAK |
| | | | [477-496] | | | | [479-498] |
| 3 | 5513 | LAFQNMNGSEYFVKIQSFLG | MSLN | 16 | 5763 | TVAEVQKLLGPHVEGLKAEE | MSLN |
| | | | [490-509] | | | | [543-562] |
| 3 | 5514 | DAYPEIEKFFPFNPLDFESF | PTTG-1 | 16 | 5764 | LNPDAKLKHQILSALSQVSK | SPAG6 |
| | | | [109-128] | | | | [219-238] |
| 3 | 5515 | GEISASHVSRMLNYMEQEVI | Ropporin-1A | 16 | 5765 | SDILELGARIFVSSIKNGMW | TDRD4 |
| | | | [173-192] | | | | [461-480] |
| 3 | 5516 | SLAEQNRFYKKAAAFVLRAV | SPAG6 | 16 | 5766 | TYGKTPFQQIINQISKLHAI | TTK |
| | | | [91-110] | | | | [728-747] |
| 3 | 5517 | IPPGFRNLVADRVPNYTSWS | SPAG8 | 17 | 5767 | LHNHSAASATGSLDLSSDFL | ATAD2 |
| | | | [213-232] | | | | [10-29] |
| 3 | 5518 | KHAWTHRLRERKQLVIYEEI | SSX-7 | 17 | 5768 | SFADTIKVFQTESHMKIVRK | CASC5 |
| | | | [161-180] | | | | [60-79] |
| 3 | 5519 | NPWEKLSIHLYFDGMSLSYF | TDRD4 | 17 | 5769 | TLEFEMRHLQREYLSLSDKI | CCDC110 |
| | | | [1330-1349] | | | | [759-778] |
| 3 | 5520 | NQTLDSYRNEIAYLNKLQQH | TTK | 17 | 5770 | QHTQELFISNITEKNSGLYT | CEA |
| | | | [562-581] | | | | [457-476] |
| 3 | 5521 | KAASAAARGFPLRTLNDWFS | WBP2NL | 17 | 5771 | IAELESKTNTLRLSQTVAPN | CEP55 |
| | | | [131-150] | | | | [139-158] |
| 3 | 5522 | QDVVTPNSVRSQVPALTTTY | ZNF645 | 17 | 5772 | VYEFRVKESSIIAPAPAEDV | EZH2 |
| | | | [301-320] | | | | [466-485] |
| 4 | 5523 | VEKALAILSQPTPSLVVDHE | ATAD2 | 17 | 5773 | RTLEVQSDYSSYARTSIRAS | hTERT |
| | | | [1312-1331] | | | | [938-957] |
| 4 | 5524 | AQLLQARLMKEESPVVSWRL | BAGE-3 | 17 | 5774 | QATHRFTFSQIFGPEVGQAS | KIF20A |
| | | | [12-31] | | | | [116-135] |
| 4 | 5525 | PVQNDLAYANDFASEYYLES | CASC5 | 17 | 5775 | QPDYDLETFVNKAESALAQQ | MCAK |
| | | | [1360-1379] | | | | [671-690] |
| 4 | 5526 | NSDILKNYNNFYRFLPTAPP | CCDC110 | 17 | 5776 | GVLANPPNISSLSPRQLLGF | MSLN |
| | | | [190-209] | | | | [50-69] |
| 4 | 5527 | TQDATYLWWVNNQSLPVSPR | CEA | 17 | 5777 | VAELATRPQNIETLQNAGVM | SPAG6 |
| | | | [171-190] | | | | [24-43] |
| 4 | 5528 | LESLKQLHEFAITEPLVTFQ | CEP55 | 17 | 5778 | QLIEGLDILFLLKTIEEFYK | TDRD4 |
| | | | [394-413] | | | | [696-715] |
| 4 | 5529 | SFGNDHSTLDGYSRRTTLSS | DKK1 | 17 | 5779 | DPKQRISIPELLAHPYVQIQ | TTK |
| | | | [157-176] | | | | [775-794] |
| 4 | 5530 | FRRADEVKSMFSSNRQKILE | EZH2 | 18 | 5780 | RRSQVEQQQLITVEKALAIL | ATAD2 |
| | | | [32-51] | | | | [1300-1319] |
| 4 | 5531 | KEGVNSHFLLFDKEPINVQV | HORMAD2 | 18 | 5781 | YSQDLGEMTKLNSKRVSFKL | CASC5 |
| | | | [201-220] | | | | [1432-1451] |
| 4 | 5532 | EDNDHARDGFQMKLDAHGFA | HSPB9 | 18 | 5782 | NENNRMSIEMEAMKTNILLI | CCDC110 |
| | | | [45-64] | | | | [562-581] |
| 4 | 5533 | EAFTTSVRSYLPNTVTDALR | hTERT | 18 | 5783 | NGNRTLTLFNVTANDARAYV | CEA |
| | | | [113-132] | | | | [551-570] |
| 4 | 5534 | FPSLHSFIKEHSLQVSPSLE | KIF20A | 18 | 5784 | RHRLLEKIRVLEAEKEKNAY | CEP55 |
| | | | [517-536] | | | | [56-75] |
| 4 | 5535 | MAMDSSLQARLFPGLAIKIQ | MCAK | 18 | 5785 | NAVASVPIMYSWSPLQQNFM | EZH2 |
| | | | [1-20] | | | | [102-121] |
| 4 | 5536 | ATQMDRVNAIPFTYEQLDVL | MSLN | 18 | 5786 | RAVRSLLRSHYREVLPLATF | hTERT |
| | | | [333-352] | | | | [8-27] |
| 4 | 5537 | QIAHLPLSGVPLMILDEERE | PTTG-1 | 18 | 5787 | KDVLKGQNWLIYTYGVTNSG | KIF20A |
| | | | [135-154] | | | | [146-165] |
| 4 | 5538 | IRAEELAQMWKVVNLPTDLF | Ropporin-1A | 18 | 5788 | QEHLVNSADDVIKMIDMGSA | MCAK |
| | | | [85-104] | | | | [435-454] |
| 4 | 5539 | DILPQLVYSLAEQNRFYKKA | SPAG6 | 18 | 5789 | QNVSMDLATFMKLRTDAVLP | MSLN |
| | | | [83-102] | | | | [522-541] |
| 4 | 5540 | DYRQEQPETFWIQRAPQLPV | SPAG8 | 18 | 5790 | VVGQFSKVLPHDSKARRLFV | SPAG6 |
| | | | [403-422] | | | | [432-451] |
| 4 | 5541 | ISYVYMKRKYEAMTKLGFKA | SSX-7 | 18 | 5791 | SVIKILEDNVLLVELFDSLG | TDRD4 |
| | | | [46-65] | | | | [825-844] |
| 4 | 5542 | WEEEAKVEFLKMVNNKAVSM | TDRD4 | 18 | 5792 | SVVKDSQVGTVNYMPPEAIK | TTK |
| | | | [590-609] | | | [ | [677-696] |
| 4 | 5543 | PYVQIQTHPVNQMAKGTTEE | TTK | 19 | 5793 | QNIPSFAPVLLLATSDKPHS | ATAD2 |
| | | | [789-808] | | | | [882-901] |
| 4 | 5544 | NGDAIEFAQLMVKAASAAAR | WBP2NL | 19 | 5794 | VQEIAEKQALAVGNKIVLHT | CASC5 |
| | | | [119-138] | | | | [1234-1253] |
| 4 | 5545 | EYNKEGKYYSKGVKLVRKKK | ZNF645 | 19 | 5795 | LPTAPPNVMSQADTVILDKS | CCDC110 |
| | | | [12-31] | | | | [204-223] |
| 5 | 5546 | GSSVKEVETYHRTRALRSLR | ATAD2 | 19 | 5796 | SWRINGIPQQHTQVLFIAKI | CEA |
| | | | [59-78] | | | | [626-645] |
| 5 | 5547 | EPEDGTALDVHFVSTLEPLS | BAGE-3 | 19 | 5797 | LKDALEKNQQWLVYDQQREV | CEP55 |
| | | | [32-51] | | | | [174-193] |
| 5 | 5548 | EWSDDQAVFTFVYDTIQLTI | CASC5 | 19 | 5798 | FVVDATRKGNKIRFANHSVN | EZH2 |
| | | | [2139-2158] | | | | [673-692] |
| 5 | 5549 | NPQFSSEKNLVFGTRIEKDL | CCDC110 | 19 | 5799 | IPQDRLTEVIASIIKPQNTY | hTERT |
| | | | [97-116] | | | | [720-739] |
| 5 | 5550 | DDPTISPSYTYYRPGVNLSL | CEA | 19 | 5800 | QDQTLAELQNNMVLVKLDLR | KIF20A |
| | | | [416-435] | | | | [785-804] |
| 5 | 5551 | QQWLVYDQQREVYVKGLLAK | CEP55 | 19 | 5801 | IKIQRSNGLIHSANVRTVNL | MCAK |
| | | | [182-201] | | | | [17-36] |
| 5 | 5552 | GFINDEIFVELVNALGQYND | EZH2 | 19 | 5802 | PIIRSIPQGIVAAWRQRSSR | MSLN |
| | | | [164-183] | | | | [258-277] |
| 5 | 5553 | EKVTEMYQFKFKYTKEGATM | HORMAD2 | 19 | 5803 | MSQRQVLQVFEQYQKARTQF | SPAG6 |
| | | | [114-133] | | | | [1-20] |
| 5 | 5554 | ERNRVATMPVRLLRDSPAAQ | HSPB9 | 19 | 5804 | SLPSPGELYAVQVKHVVSPN | TDRD4 |
| | | | [25-44] | | | | [1406-1425] |
| 5 | 5555 | TLTDLQPYMRQFVAHLQETS | hTERT | 19 | 5805 | AKGTTEEMKYVLGQLVGLNS | TTK |
| | | | [765-784] | | | | [802-821] |
| 5 | 5556 | IAEQYHTVLKLQGQVSAKKR | KIF20A | 20 | 5806 | VRFDSVGGLSNHIAALKEMV | ATAD2 |
| | | | [810-829] | | | | [423-442] |
| 5 | 5557 | EVYVTFFEIYNGKLFDLLNK | MCAK | 20 | 5807 | FPFLDKRYRKIVDVNFQSLL | CASC5 |
| | | | [396-415] | | | | [2167-2186] |
| 5 | 5558 | YPESVIQHLGYLFLKMSPED | MSLN | 20 | 5808 | TAEENFLQEIKNAKSEASIY | CCDC110 |
| | | | [364-383] | | | | [671-690] |
| 5 | 5559 | GLKLGSGPSIKALDGRSQVS | PTTG-1 | 20 | 5809 | VNEEATGQFRVYPELPKPSI | CEA |
| | | | [23-42] | | | | [130-149] |
| 5 | 5560 | LHSQVAGRLIIRAEELAQMW | Ropporin-1A | 20 | 5810 | IFELEKKTETAAHSLPQQTK | CEP55 |
| | | | [75-94] | | | | [202-221] |
| 5 | 5561 | AHSENLAMAVIISKGVPQLS | SPAG6 | 20 | 5811 | YMRLRQLKRFRRADEVKSMF | EZH2 |
| | | | [322-341] | | | | [23-42] |
| 5 | 5562 | SSDDSPRSALAAATAAAAAA | SPAG8 | 20 | 5812 | YVVELLRSFFYVTETTFQKN | hTERT |
| | | | [35-54] | | | | [552-571] |
| 5 | 5563 | PEKIQKSFDDIAKYFSKKEW | SSX-7 | 20 | 5813 | MSQGILSPPAGLLSDDDVVV | KIF20A |
| | | | [18-37] | | | | [1-20] |
| 5 | 5564 | VVEKQFDQLLAFFDSRKKNL | TDRD4 | 20 | 5814 | LLLVHEPKLKVDLTKYLENQ | MCAK |
| | | | [189-208] | | | | [288-307] |
| 5 | 5565 | WERKSYWKNMLEAVHTIHQH | TTK | 20 | 5815 | SRDPSWRQPERTILRPRFRR | MSLN |
| | | | [622-641] | | | | [276-295] |
| 5 | 5566 | SNVFSGRKTGTLFLTSYRVI | WBP2NL | 20 | 5816 | SKHSVDLAEMVVEAEIFPVV | SPAG6 |
| | | | [40-59] | | | | [237-256] |
| 5 | 5567 | KRTYLSQKSLQAHIKRRHKR | ZNF645 | 20 | 5817 | SILVQFVDYGSTAKLTLNRL | TDRD4 |
| | | | [121-140] | | | | [1510-1529] |
| 6 | 5568 | PASPARPRYRLSSAGPRSPY | ATAD2 | 20 | 5818 | VERGAVPLEMLEIALRNLNL | TTK |
| | | | [325-344] | | | | [170-189] |
| 6 | 5569 | LQARLMKEESPVVSWRLEPE | BAGE-3 | 21 | 5819 | RKIRKKSNWYLGTIKKARKI | ATAD2 |
| | | | [15-34] | | | | [1164-1183] |
| 6 | 5570 | NQDARILAMTPESIYSNPSI | CASC5 | 21 | 5820 | AGKLNLSPSQYINEENLPVY | CASC5 |
| | | | [429-448] | | | | [1726-1745] |
| 6 | 5571 | LEALVKKLLPFRETVSKFHV | CCDC110 | 21 | 5821 | ELKKHSQENIKFENSISRLT | CCDC110 |
| | | | [315-334] | | | | [721-740] |
| 6 | 5572 | SASGHSRTTVKTITVSAELP | CEA | 21 | 5822 | QQSTQELFIPNITVNNSGSY | CEA |
| | | | [482-501] | | | | [278-297] |
| 6 | 5573 | EEKDVLKQQLSAATSRIAEL | CEP55 | 21 | 5823 | LKELRKARNQITQLESLKQL | CEP55 |
| | | | [123-142] | | | | [381-400] |
| 6 | 5574 | LQQNFMVEDETVLHNIPYMG | EZH2 | 21 | 5824 | FLFNLNNDFVVDATRKGNKI | EZH2 |
| | | | [116-135] | | | | [665-684] |
| 6 | 5575 | QDLEPLPNNVVLTMKLHYYN | HORMAD2 | 21 | 5825 | LWGSRHNERRFLRNTKKFIS | hTERT |
| | | | [169-188] | | | | [477-496] |
| 6 | 5576 | VVQVDGQWLMVTGQQQLDVR | HSPB9 | 21 | 5826 | LNGGLQEEELSTSLKRSVYI | KIF20A |
| | | | [69-88] | | | | [228-247] |
| 6 | 5577 | LGLDDIHRAWRTFVLRVRAQ | hTERT | 21 | 5827 | SLRSRSTRMSTVSELRITAQ | MCAK |
| | | | [681-700] | | | | [106-125] |
| 6 | 5578 | ILIKQDQTLAELQNNMVLVK | KIF20A | 21 | 5828 | SGKKAREIDESLIFYKKWEL | MSLN |
| | | | [781-800] | | | | [304-323] |
| 6 | 5579 | FVNKAESALAQQAKHFSALR | MCAK | 21 | 5829 | ALALGRLANYNDDLAEAVVK | SPAG6 |
| | | | [679-698] | | | | [62-81] |
| 6 | 5580 | LSTERVRELAVALAQKNVKL | MSLN | 21 | 5830 | SLYLTGAVATIILQVDSEEN | TDRD4 |
| | | | [77-96] | | | | [1051-1070] |
| 6 | 5581 | NLLQSPSSILSTLDVELPPV | PTTG-1 | 21 | 5831 | SEEEKKNLSASTVLTAQESF | TTK |
| | | | [177-196] | | | | [196-215] |
| 6 | 5582 | NRAELTPELLKILHSQVAGR | Ropporin-1A | 22 | 5832 | EIVVIGATNRLDSIDPALRR | ATAD2 |
| | | | [63-82] | | | | [567-586] |
| 6 | 5583 | LQVFEQYQKARTQFVQMVAE | SPAG6 | 22 | 5833 | ADGTSLDFSTYRSSQMESQF | CASC5 |
| | | | [7-26] | | | | [1856-1875] |
| 6 | 5584 | PQKQPPWEFLQVLEPGARGL | SPAG8 | 22 | 5834 | STDNLSSNIIIHPSENSDIL | CCDC110 |
| | | | [239-258] | | | | [175-194] |
| 6 | 5585 | THRLRERKQLVIYEEISDPE | SSX-7 | 22 | 5835 | PNASLLIQNIIQNDTGFYTL | CEA |
| | | | [165-184] | | | | [103-122] |
| 6 | 5586 | VPKLSEFELIKMTNEIQSNL | TDRD4 | 22 | 5836 | GETENREKVAASPKSPTAAL | CEP55 |
| | | | [1199-1218] | | | | [414-433] |
| 6 | 5587 | GQNESFARIQVRFAELKAIQ | TTK | 22 | 5837 | MFSSNRQKILERTEILNQEW | EZH2 |
| | | | [104-123] | | | | [41-60] |
| 6 | 5588 | GWEGQATFKLVFRNGDAIEF | WBP2NL | 22 | 5838 | RNTKKFISLGKHAKLSLQEL | hTERT |
| | | | [106-125] | | | | [489-508] |
| 6 | 5589 | SLSLPFPIQWETVSIFTRKH | ZNF645 | 22 | 5839 | SPMFESTAADLGSVVRKNLL | KIF20A |
| | | | [216-235] | | | | [21-40] |
| 7 | 5590 | REDKVIPVTRSLRARNIVQS | ATAD2 | 22 | 5840 | EEQVHSIRGSSSANPVNSVR | MCAK |
| | | | [122-141] | | | | [170-189] |
| 7 | 5591 | TPEDLMLSQYVYRPKIQIYR | CASC5 | 22 | 5841 | GLKAEERHRPVRDWILRQRQ | MSLN |
| | | | [1928-1947] | | | | [557-576] |
| 7 | 5592 | FHSRVPRYTLSFLDQTKHEM | CCDC110 | 22 | 5842 | QEIKAEPGSLLQEYINSINS | SPAG6 |
| | | | [373-392] | | | | [460-479] |
| 7 | 5593 | IIQNDTGFYTLHVIKSDLVN | CEA | 22 | 5843 | HFYIRKYSQIKDAKVLEKKV | TDRD4 |
| | | | [112-131] | | | | [429-448] |
| 7 | 5594 | VERQTITQLSFELSEFRRKY | CEP55 | 22 | 5844 | LNKLQQHSDKIIRLYDYEIT | TTK |
| | | | [250-269] | | | | [575-594] |
| 7 | 5595 | WRKRVKSEYMRLRQLKRFRR | EZH2 | 23 | 5845 | KEMVVFPLLYPEVFEKFKIQ | ATAD2 |
| | | | [15-34] | | | | [439-458] |
| 7 | 5596 | DYQPLGFKEGVNSHFLLFDK | HORMAD2 | 23 | 5846 | EENMDITKSHTVAIDNQIFK | CASC5 |
| | | | [194-213] | | | | [507-526] |
| 7 | 5597 | QQQLDVRDPERVSYRMSQKV | HSPB9 | 23 | 5847 | NSISRLTEDKILLENYVRSI | CCDC110 |
| | | | [82-101] | | | | [734-753] |
| 7 | 5598 | DYSSYARTSIRASLTFNRGF | hTERT | 23 | 5848 | EPEIQNTTYLWWVNNQSLPV | CEA |
| | | | [945-964] | | | | [346-365] |
| 7 | 5599 | SPYARILRSRRSPLLKSGPF | KIF20A | 23 | 5849 | IPYMGDEVLDQDGTFIEELI | EZH2 |
| | | | [867-886] | | | | [131-150] |
| 7 | 5600 | PKESLRSRSTRMSTVSELRI | MCAK | 23 | 5850 | HVRKAFKSHVSTLTDLQPYM | hTERT |
| | | | [103-122] | | | | [754-773] |
| 7 | 5601 | DRVNAIPFTYEQLDVLKHKL | MSLN | 23 | 5851 | DLKPLLSNEVIWLDSKQIRQ | KIF20A |
| | | | [337-356] | | | | [200-219] |
| 7 | 5602 | PALPKATRKALGTVNRATEK | PTTG-1 | 23 | 5852 | KAHTPFRESKLTQVLRDSFI | MCAK |
| | | | [54-73] | | | | [534-553] |
| 7 | 5603 | SVMNVGRFTEEIEWLKFLAL | Ropporin-1A | 23 | 5853 | RELAVALAQKNVKLSTEQLR | MSLN |
| | | | [106-125] | | | | [83-102] |
| 7 | 5604 | PTIQQTAALALGRLANYNDD | SPAG6 | 23 | 5854 | VRYYSPGYSDTLLQRVDSYQ | SPAG6 |
| | | | [55-74] | | | | [486-505] |
| 7 | 5605 | GSESFFFRHGHRGLLTMQLK | SPAG8 | 23 | 5855 | KFKSQSLRSHFEKNTTLHYH | TDRD4 |
| | | | [303-322] | | | | [650-669] |
| 7 | 5606 | SGPKRGKHAWTHRLRERKQL | SSX-7 | 23 | 5856 | NPEDWLSLLLKLEKNSVPLS | TTK |
| | | | [155-174] | | | | [61-80] |
| 7 | 5607 | KIVAIKEFNPLSILVQFVDY | TDRD4 | 24 | 5857 | ISAKDFEVAMQKMIPASQRA | ATAD2 |
| | | | [1499-1518] | | | | [674-693] |
| 7 | 5608 | LSDALLNKLIGRYSQAIEAL | TTK | 24 | 5858 | LLPNEIAIRPMDKTVLFTDN | CASC5 |
| | | | [79-98] | | | | [1167-1186] |
| 7 | 5609 | ALIPNGESLLKRSPNVELSF | WBP2NL | 24 | 5859 | DEVDSVLLSASKILNSSEGV | CCDC110 |
| | | | [14-33] | | | | [11-30] |
| 7 | 5610 | DIQAPPPELSLSLPFPIQWE | ZNF645 | 24 | 5860 | EPETQDATYLWWVNNQSLPV | CEA |
| | | | [207-226] | | | | [168-187] |
| 8 | 5611 | KRYYLRQRKATVYYQAPLEK | ATAD2 | 24 | 5861 | RQVYEFRVKESSIIAPAPAE | EZH2 |
| | | | [292-311] | | | | [464-483] |
| 8 | 5612 | PHVSKERIQQSLSNPLSISL | CASC5 | 24 | 5862 | DGLRPIVNMDYVVGARTFRR | hTERT |
| | | | [566-585] | | | | [628-647] |
| 8 | 5613 | LKEFKKIISKYNVLQGQNKT | CCDC110 | 24 | 5863 | DISMYGKEELLQVVEAMKTL | KIF20A |
| | | | [505-524] | | | | [554-573] |
| 8 | 5614 | PRLQLSNDNRTLTLLSVTRN | CEA | 24 | 5864 | DDVAAINPELLQLLPLHPKD | MCAK |
| | | | [367-386] | | | | [59-78] |
| 8 | 5615 | HQLHVILKELRKARNQITQL | CEP55 | 24 | 5865 | LDQDQQEAARAALQGGGPPY | MSLN |
| | | | [375-394] | | | | [215-234] |
| 8 | 5616 | GPNAKSVQREQSLHSFHTLF | EZH2 | 24 | 5866 | REIAKHTPELSQLVVNAGGV | SPAG6 |
| | | | [266-285] | | | | [276-295] |
| 8 | 5617 | STGFHSMKVKVMTEATKVID | HORMAD2 | 24 | 5867 | NVWQPDAIEVLQQLLSKRQV | TDRD4 |
| | | | [224-243] | | | | [1301-1320] |
| 8 | 5618 | YRMSQKVHRKMLPSNLSPTA | HSPB9 | 24 | 5868 | NESFARIQVRFAELKAIQEP | TTK |
| | | | [95-114] | | | | [106-125] |
| 8 | 5619 | RLPRLPQRYWQMRPLFLELL | hTERT | 25 | 5869 | LSLEHIGRRRLRSAGAAQKK | ATAD2 |
| | | | [378-397] | | | | [29-48] |
| 8 | 5620 | DGGILPRSLALIFNSLQGQL | KIF20A | 25 | 5870 | NLNNLNGKTGEFLAFQTVHL | CASC5 |
| | | | [176-195] | | | | [1586-1605] |
| 8 | 5621 | DSSFPNWEFARMIKEFRATL | MCAK | 25 | 5871 | EKNIQLSLEKQQMMEALDQL | CCDC110 |
| | | | [224-243] | | | | [527-546] |
| 8 | 5622 | LLATQMDRVNAIPFTYEQLD | MSLN | 25 | 5872 | RNNSIVKSITVSASGTSPGL | CEA |
| | | | [331-350] | | | | [664-683] |
| 8 | 5623 | KMTEKTVKAKSSVPASDDAY | PTTG-1 | 25 | 5873 | QRGSKKHLLLAPSDVAGWGI | EZH2 |
| | | | [92-111] | | | | [607-626] |
| 8 | 5624 | KMLKEFAKAAIRVQPQDLIQ | Ropporin-1A | 25 | 5874 | TYVPLLGSLRTAQTQLSRKL | hTERT |
| | | | [16-35] | | | | [1088-1107] |
| 8 | 5625 | IQEPEIALKRIAASALSDIA | SPAG6 | 25 | 5875 | QNLVPFRDSKLTRVFQGFFT | KIF20A |
| | | | [176-195] | | | | [454-473] |
| 8 | 5626 | RKLFEVESVTHHDYRMELAQ | SPAG8 | 25 | 5876 | KREEKKAQNSEMRMKRAQEY | MCAK |
| | | | [373-392] | | | | [204-223] |
| 8 | 5627 | MNGDDAFARRPRAGAQIPEK | SSX-7 | 25 | 5877 | PQAPRRPLPQVATLIDRFVK | MSLN |
| | | | [1-20] | | | | [409-428] |
| 8 | 5628 | RRGQIIRMVTDTLVEVLLYD | TDRD4 | 25 | 5878 | LSEEPEDHIKAAAAWALGQI | SPAG6 |
| | | | [980-999] | | | | [344-363] |
| 8 | 5629 | KIIRLYDYEITDQYIYMVME | TTK | 25 | 5879 | EEFARTTDDYLSNLIKAKSY | TDRD4 |
| | | | [584-603] | | | | [210-229] |
| 8 | 5630 | HTENRRGALIPNGESLLKRS | WBP2NL | 25 | 5880 | DSRGQTTKARFLYGENMPPQ | TTK |
| | | | [7-26] | | | | [230-249] |
| 8 | 5631 | TTYDPSSGYIIVKVPPDMNS | ZNF645 | 26 | 5881 | SEKLQLDLSSINISAKDFEV | ATAD2 |
| | | | [318-337] | | | | [662-681] |
| 9 | 5632 | SSSKYAPSYYHVMPKQNSTL | ATAD2 | 26 | 5882 | RNKKNSRRVSFADTIKVFQT | CASC5 |
| | | | [1114-1133] | | | | [51-70] |
| 9 | 5633 | QLNNRDRRNVDFTSSHATAV | CASC5 | 26 | 5883 | DLPTENQEENLSMEKSHHFE | CCDC110 |
| | | | [1302-1321] | | | | [115-134] |
| 9 | 5634 | MSQADTVILDKSKITVPFLK | CCDC110 | 26 | 5884 | TVYAEPPKPFITSNNSNPVE | CEA |
| | | | [212-231] | | | | [317-336] |
| 9 | 5635 | QQHTQVLFIAKITPNNNGTY | CEA | 26 | 5885 | VVDATRKGNKIRFANHSVNP | EZH2 |
| | | | [634-653] | | | | [674-693] |
| 9 | 5636 | VYDQQREVYVKGLLAKIFEL | CEP55 | 26 | 5886 | SLLRSHYREVLPLATFVRRL | hTERT |
| | | | [186-205] | | | | [12-31] |
| 9 | 5637 | YQHLEGAKEFAAALTAERIK | EZH2 | 26 | 5887 | QGTIKDGGILPRSLALIFNS | KIF20A |
| | | | [325-344] | | | | [171-190] |
| 9 | 5638 | IKKASVLLIRKLYILMQDLE | HORMAD2 | 26 | 5888 | IRALGQNKAHTPFRESKLTQ | MCAK |
| | | | [153-172] | | | | [527-546] |
| 9 | 5639 | RSLLRSHYREVLPLATFVRR | hTERT | 26 | 5889 | LFSLGWVQPSRTLAGETGQE | MSLN |
| | | | [11-30] | | | | [25-44] |
| 9 | 5640 | LNQNSSRSHSIFSIRILHLQ | KIF20A | 26 | 5890 | TNTLPVLLSLYMSTESSEDL | SPAG6 |
| | | | [373-392] | | | | [377-396] |
| 9 | 5641 | AKHFSALRDVIKALRLAMQL | MCAK | 26 | 5891 | ISPEKIYVQWLLTENLLNSL | TDRD4 |
| | | | [691-710] | | | | [926-945] |
| 9 | 5642 | RQLDVLYPKARLAFQNMNGS | MSLN | 26 | 5892 | ISVKGRIYSILKQIGSGGSS | TTK |
| | | | [479-498] | | | | [518-537] |
| 9 | 5643 | SQVSTPRFGKTFDAPPALPK | PTTG-1 | 27 | 5893 | KIDLHKYLTVKDYLRDIDLI | ATAD2 |
| | | | [39-58] | | | | [1037-1056] |
| 9 | 5644 | PELLKILHSQVAGRLIIRAE | Ropporin-1A | 27 | 5894 | QDLIKDPRNLLANQTLVYSQ | CASC5 |
| | | | [69-88] | | | | [1415-1434] |
| 9 | 5645 | LKDKDEYVKKNASTLIREIA | SPAG6 | 27 | 5895 | IKNAKSEASIYKNSLSEIGK | CCDC110 |
| | | | [260-279] | | | | [680-699] |
| 9 | 5646 | FEVESVTHHDYRMELAQAGT | SPAG8 | 27 | 5896 | ETQNPVSARRSDSVILNVLY | CEA |
| | | | [376-395] | | | | [216-235] |
| 9 | 5647 | DIAKYFSKKEWEKMKSLEKI | SSX-7 | 27 | 5897 | IFAKRAIQTGEELFFDYRYS | EZH2 |
| | | | [27-46] | | | | [710-729] |
| 9 | 5648 | RSHFEKNTTLHYHPPILPKE | TDRD4 | 27 | 5898 | TDALRGSGAWGLLLRRVGDD | hTERT |
| | | | [657-676] | | | | [128-147] |
| 9 | 5649 | IGSGGSSKVFQVLNEKKQIY | TTK | 27 | 5899 | PVPANIRFSIWISFFEIYNE | KIF20A |
| | | | [531-550] | | | | [292-311] |
| 9 | 5650 | GGWEGQATFKLVFRNGDAIE | WBP2NL | 27 | 5900 | ETGQEAAPLDGVLANPPNIS | MSLN |
| | | | [105-124] | | | | [40-59] |
| 9 | 5651 | SASEFASHHYNLNILPQFTE | ZNF645 | 27 | 5901 | YYSPGYSDTLLQRVDSYQPL | SPAG6 |
| | | | [351-370] | | | | [488-507] |
| 10 | 5652 | QEEDTFRELRIFLRNVTHRL | ATAD2 | 27 | 5902 | YDDGLWYRAKIVAIKEFNPL | TDRD4 |
| | | | [981-1000] | | | | [1490-1509] |
| 10 | 5653 | RPMDKTVVFVDNHVELEMTE | CASC5 | 27 | 5903 | QVLNEKKQIYAIKYVNLEEA | TTK |
| | | | [963-982] | | | | [541-560] |
| 10 | 5654 | LQNVSMVQSEISEILNKSII | CCDC110 | 28 | 5904 | SLDLSSDFLSLEHIGARRLR | ATAD2 |
| | | | [74-93] | | | | [21-40] |
| 10 | 5655 | PPAQYSWLIDGNIQQHTQEL | CEA | 28 | 5905 | FQDLSINSADKIHITRSHIM | CASC5 |
| | | | [443-462] | | | | [398-417] |
| 10 | 5656 | EVHNLNQLLYSQRRADVQHL | CEP55 | 28 | 5906 | SKMKPLIFTTQSLIQKVETY | CCDC110 |
| | | | [275-294] | | | | [457-476] |
| 10 | 5657 | EWKQRRIQPVHILTSVSSLR | EZH2 | 28 | 5907 | TYLWWVNGQSLPVSPRLQLS | CEA |
| | | | [59-78] | | | | [531-550] |
| 10 | 5658 | KRYLRMAVLTLYTDPMGSEK | HORMAD2 | 28 | 5908 | YRYSQADALKYVGIEREMEI | EZH2 |
| | | | [96-115] | | | | [726-745] |
| 10 | 5659 | GLLLDTRTLEVQSDYSSYAR | hTERT | 28 | 5909 | SVWSKLQSIGIRQHLKRVQL | hTERT |
| | | | [932-951] | | | | [579-598] |
| 10 | 5660 | TVKEMVKDVLKGQNWLIYTY | KIF20A | 28 | 5910 | FRDSKLTRVFQGFFTGRGRS | KIF20A |
| | | | [140-159] | | | | [459-478] |
| 10 | 5661 | EELSSQMSSFNEAMTQIREL | MCAK | 28 | 5911 | VIQHLGYLFLKMSPEDIRKW | MSLN |
| | | | [625-644] | | | | [368-387] |
| 10 | 5662 | QGGIPNGYLVLDLSMQEALS | MSLN | 28 | 5912 | AVSMKVFREEDGVLIVDLQK | TDRD4 |
| | | | [587-606] | | | | [606-625] |
| 10 | 5663 | AHLPLSGVPLMILDEERELE | PTTG-1 | 28 | 5913 | LNKLIGRYSQAIEALPPDKY | TTK |
| | | | [137-156] | | | | [84-103] |
| 10 | 5664 | GPDGIITVNDFTQNPRVQLE | Ropporin-1A | 29 | 5914 | RIRSRYSGVNQSMLFDKLIT | ATAD2 |
| | | | [193-212] | | | | [159-178] |
| 10 | 5665 | LPHDSKARRLFVTSGGLKKV | SPAG6 | 29 | 5915 | EKLQDGRITIREFFILLQVH | CASC5 |
| | | | [440-459] | | | | [1887-1906] |
| 10 | 5666 | SYQPPGNVYWPLRGKREAML | SPAG8 | 29 | 5916 | IAESENQIQPQSALKVLQQQ | CCDC110 |
| | | | [334-353] | | | | [43-62] |
| 10 | 5667 | SSDMPVSLRDALVFMELAKF | TDRD4 | 29 | 5917 | NGIPQQHTQVLFIAKITPNN | CEA |
| | | | [632-651] | | | | [630-649] |
| 10 | 5668 | KAVERGAVPLEMLEIALRNL | TTK | 29 | 5918 | FSVLNYERARRPGLLGASVL | hTERT |
| | | | [168-187] | | | | [662-681] |
| 10 | 5669 | WEGQATFKLVFRNGDAIEFA | WBP2NL | 29 | 5919 | PRSLALIFNSLQGQLHPTPD | KIF20A |
| | | | [107-126] | | | | [181-200] |
| 10 | 5670 | PQFTQTDAMDHRRWPAWKRL | ZNF645 | 29 | 5920 | SLSPEELSSVPPSSIWAVRP | MSLN |
| | | | [377-396] | | | | [451-470] |
| 11 | 5671 | AVLQKMDDMKKMRRQRMREL | ATAD2 | 29 | 5921 | QDKNQWRRGQIIRMVTDTLV | TDRD4 |
| | | | [183-202] | | | | [974-993] |
| 11 | 5672 | EKSTKIDTTSFLANLKLHTE | CASC5 | 29 | 5922 | ITDSITLKNKTESSLLAKLE | TTK |
| | | | [198-217] | | | | [350-369] |
| 11 | 5673 | LKNYNNFYRFLPTAPPNVMS | CCDC110 | 30 | 5923 | IYKDRMKIGASLADVDPMQL | ATAD2 |
| | | | [194-213] | | | | [400-419] |
| 11 | 5674 | NGNRTLTLFNVTANDTASYK | CEA | 30 | 5924 | RLLGEEIEYLKRWGPNYNLM | CASC5 |
| | | | [195-214] | | | | [2237-2256] |
| 11 | 5675 | FNSSINNIHEMEIQLKDALE | CEP55 | 30 | 5925 | LHSVEEKLSGDSVNSLPQSV | CCDC110 |
| | | | [160-179] | | | | [139-158] |
| 11 | 5676 | NGDHRIGIFAKRAIQTGEEL | EZH2 | 30 | 5926 | VHNLPQHLFGYSWYKGERVD | CEA |
| | | | [703-722] | | | | [55-74] |
| 11 | 5677 | ITNEHESLKMVKKLFATSIS | HORMAD2 | 30 | 5927 | AFKSHVSTLTDLQPYMRQFV | hTERT |
| | | | [25-44] | | | | [758-777] |
| 11 | 5678 | DKEQLRPSFLLSSLRPSLTG | hTERT | 30 | 5928 | RILRSRRSPLLKSGPFGKKY | KIF20A |
| | | | [337-356] | | | | [871-890] |
| 11 | 5679 | SELALRRSQRLAASASTQQL | KIF20A | 30 | 5929 | RITKANVDLLPRGAPERQRL | MSLN |
| | | | [670-689] | | | | [143-162] |
| 11 | 5680 | ITAQENDMEVELPAAANSRK | MCAK | 30 | 5930 | VGDDGTIFVVPKLSEFELIK | TDRD4 |
| | | | [122-141] | | | | [1190-1209] |
| 11 | 5681 | EDLDALPLDLLLFLNPDAFS | MSLN | 30 | 5931 | VQNSHFKEPLVSDEKSSELI | TTK |
| | | | [113-132] | | | | [330-349] |

### Example 17—Personalised Selection of Peptides to Treat Cancer

[0421] Effective immunotherapy for cancer patients stimulates T cell responses (ideally CD4+ and CD8+ T cell responses) that target TAA expressed by the cancer cells of the specific patient.

[0422] For treatment of a specific cancer patient, peptides comprising one or more of the 3286 hotspot amino acid sequences can be selected based on (i) cancer type (select peptides comprising hotspot sequences that are fragments of TSAs that are associated with the patient's cancer); (ii) TSA expression or TSA expression rate (sample patient's cancer cells and select peptides comprising hotspot sequences that are fragments of a TSA in fact expressed in the patient's cancer cells; or select peptides comprising hotspot sequences that are fragments of TSAs that are most frequently expressed in the patient's type of cancer); (iii) patient HLA genotype (select peptides comprising fragments of TSAs that comprise an amino acid sequence that is a T cell epitope capable of binding to at least three HLA class I alleles of the patient (HLA class I-binding PEPI3+) (and ideally also comprise an amino acid sequence that is a T cell epitope capable of binding to multiple HLA class II alleles of the patient (HLA class II-binding PEPI2/3/4/5+)).

[0423] To illustrate the options for selecting peptides comprising hotspot amino acid sequences to treat individual patients, HLA class I-binding PEPI3+ were identified in the hotspot sequences for three colorectal cancer patients, one ovarian cancer patient and three breast cancer patients with known HLA genotypes. Only hotspot sequences that are fragments of TSA associated with the corresponding cancer (colorectal, ovarian, breast, Table 24) were considered. The number of hotspots sequences containing such a PEPI3+ and the number of antigens that could be targeted using selected peptides comprising a hotspot amino acid sequence are shown in Table 26. As expected, more hotspots containing PEPI3+ were identified and more TSA could be targeted using the hotspot sequences identified following a greater number of cycles of the method described in Example 16.

TABLE 26
Number of selectable peptides matching to the patient HLA background) from
antigens related to the indication. In case of MaxCycle = 1, each antigen has only one
potential peptide, therefore the peptide and antigen are selected together. The MaxCycle >1
means that more than one peptides are related to a single antigen and hopefully more
than one is matching to the patient's HLA set, therefore #peptides >= #antigens.

| | Patient | MaxCycle = 1 | | MaxCycle = 3 | | MaxCycle = 5 | | MaxCycle = 30 | |
|---|---|---|---|---|---|---|---|---|---|
| Indication | ID | #Peptides | #AG | #Peptides | #AG | #Peptides | #AG | #Peptides | #AG |
| Colorectal | CRC_P1 | 16 | 16 | 32 | 24 | 36 | 25 | 63 | 27 |
| (70 AGs) | CRC_P2 | 13 | 13 | 29 | 15 | 34 | 27 | 54 | 28 |
| | CRC_P3 | 14 | 14 | 36 | 31 | 48 | 37 | 98 | 43 |
| Ovarian | OC_P1 | 10 | 10 | 17 | 14 | 28 | 20 | 51 | 22 |
| (54 AGs) | | | | | | | | | |
| Breast | BRC_P1 | 27 | 17 | 45 | 31 | 60 | 34 | 99 | 35 |
| (70 AGs) | BRC_P2 | 23 | 13 | 43 | 35 | 48 | 36 | 86 | 36 |
| | BRC_P3 | 13 | 13 | 26 | 19 | 33 | 23 | 60 | 28 |

[0424] Table 27 shows the peptide/hotspot amino acid sequences that are fragments of the breast cancer-associated TSA identified just in the first cycle of the method described in Example 16 that are expected to induce T cell responses in the three breast cancer patients of Table 26.

TABLE 27
Options for peptide selection for breast cancer
patients. Sequences are fragments of known
breast cancer-associated CTAs and were identi-
fied in first cycle of method described in
Example 16. “+” indicates peptide comprises
subject-matched HLA class I-binding PEPI3+

| SEQ | | | | |
|---|---|---|---|---|
| ID | | BRC_ | BRC_ | BRC_ |
| NO | Sequence | P1 | P2 | P3 |
| 4 | PHNFRVYSYSGTGIMKPLDQ | − | − | − |
| 7 | DEVSFYANRLTNLVIAMARK | + | + | − |
| 8 | IDDLSFYVNRLSSLVIQMAH | − | + | + |
| 10 | ARAVFLALSAQLLQARLMKE | − | − | − |
| 16 | QTTQNGRFYAISARFKPFSN | − | − | − |
| 19 | EGKDPAFTALLTTQLQVQRE | − | − | − |
| 20 | QGPTAVRKRFFESIIKEAAR | − | − | − |
| 21 | ATAQLQRTPMSALVFPNKIS | − | + | − |
| 22 | LDMVHSLLHRLSHNDHILIE | + | − | − |
| 26 | HTRFTQSGTMKIHILQKHGE | + | − | − |
| 29 | NTGEMSSNSTALALVRPSSS | − | − | − |
| 32 | NLLRGIDSLFSAPMDFRGLP | − | + | − |
| 35 | SERVRTYWIIIELKHKAREK | + | + | − |
| 40 | EHLEVKFMNPYNAVLTKKFQ | + | + | − |
| 41 | SGSSYFVLANGHILPNSENA | − | − | − |
| 42 | ISDTKDYFMSKTLGIGRLKR | + | − | − |
| 44 | EEMRSHYVAQTGILWLLMNN | − | − | − |
| 45 | SRGKSTYYWPRPRRYVQPPE | − | − | − |
| 46 | WRGRSTYYWPRPRRYVQPPE | − | − | − |
| 48 | ALSRHMSSLSHISPFSHSSH | − | + | − |
| 51 | RLNDLQMSNFVNLKNITYLV | − | + | − |
| 54 | KKVNFLDMSLDDIIIYKELE | − | − | + |
| 57 | KLRYRYTLDDLYPMMNALKL | + | + | + |
| 60 | PDSRLLQLHITMPFSSPMEA | + | + | − |
| 61 | QRNVAIMKSIIPAIVHYSPD | + | − | − |
| 62 | SEELNIILQGNIILSTEKSK | − | − | − |
| 64 | VKVLEYVIKVSARVRFFFPS | − | + | + |
| 65 | DDTTAMASASSSATGSFSYP | − | − | − |
| 66 | DPTSHSYVLVTSLNLSYDGI | + | + | − |
| 67 | ALSRKMAELVHFLLLKYRAR | + | + | − |
| 68 | GREDSVFAHPRKLLMQDLVQ | + | − | + |
| 69 | FPVIFSKASSSLQLVFGIEL | − | − | − |
| 70 | VNARVRIAYPSLREAALLEE | − | − | − |
| 71 | KSPQGASAIPTAIDFTLWRQ | − | − | − |
| 72 | KKLLTQYFVQENYLEYRQVP | − | − | + |
| 73 | RAPEEAIWEALSVMGLYDGR | − | + | − |
| 74 | PAQLEFMFQEALKLKVAELV | + | + | + |
| 80 | RPVSSFFSYTLASLLQSSHE | − | − | + |
| 81 | ATVMASESLSVMSSNVSFSE | + | − | − |
| 83 | RSQAGMFIYSNNRLIKMHEK | + | − | + |
| 87 | EEAFSRASLVSVYNSYPYYP | + | − | − |
| 90 | QSQGSVLAFTRTFIATPGSS | − | + | − |
| 91 | KRASQYSGQLKVLIAENTML | + | − | − |
| 93 | KEFTVSGNILTIRLTAADHR | − | − | − |
| 96 | EKSTKYVFDSAPSHSISART | − | − | − |
| 97 | NSPLPFQWRITHSFRWMAQV | − | + | + |
| 105 | KEMELWMKAMLDAALVQTEP | + | − | − |
| 106 | QYAHKLAFLVGQSIHREPNL | + | − | − |
| 107 | RSVVGFVASINLTLTKWYSR | + | + | + |
| 110 | KAVSQDMVIYSTEIHYSSKG | − | − | − |
| 111 | RLDQLLRHVMNPLETLSITN | − | + | − |
| 116 | PPAFINMAATGVSSMSTRDQ | + | − | − |
| 118 | NNNIEKMITAFEELRVQAEN | − | + | − |
| 122 | QSSGISFQSKYLSFFILGQT | − | − | − |
| 124 | PDNIPAFAAAYFESLLEKRE | + | + | − |
| 126 | RDAVKFFVAVPGQVISPQSS | + | − | − |
| 127 | KKMKTSESSTILVVRYRRNV | − | − | + |
| 129 | AEIQALTFLSSDYLSRVYLP | − | − | − |
| 130 | RIQVEHPQMTFGRLHRIIPK | + | − | + |
| 131 | VERPQMTFGRLQGISPKIMP | + | − | − |
| 132 | QRPQMTFGRLQGIFPKIMPK | + | − | − |
| 133 | SEKIVYVYMKLNYEVMTKLG | − | + | − |
| 134 | NQVEHPQMTFGRLQGIFPKI | − | − | − |
| 135 | EFEETAKKVRRAIEQLAAMD | − | − | − |
| 142 | LSQFWEFSETTASTVSTTLH | − | − | − |
| 149 | EELQKVQFEKVSALADLSST | + | + | − |
| 155 | VGILHLGSRQKKIRIQLRSQ | − | − | − |

### Example 18—Selection of Polynucleic Acids for Treatment of Cancer

[0425] Some peptides that are difficult to manufacture and use as peptide vaccines can still be used in vaccines and immunotherapy if delivered to patients as peptide-encoding polynucleic acids or vectors. To optimally design a set of peptides for treating cancer to be encoded by a nucleic acid or vector for administration to patients, the method of Example 16 was repeated but without eliminating hotspot sequences that did not meet the peptide manufacturing feasibility requirements. Table 28 shows the hotspot sequences identified in the first 20 cycles and the TSA of which they are a fragment.

TABLE 28
Hotspot Sequences and corresponding TAA

| | | | Source | | | | Source |
|---|---|---|---|---|---|---|---|
| | SEQ | | antigen(s) | | SEQ | | antigen(s) |
| Cy- | ID | | and AA | Cy- | ID | | and AA |
| cle | NO | AA Sequence | position | cle | NO | AA Sequence | position |
| 1 | 2787 | AGDGRLRLARLALVLLGWVS | 5T4 | 19 | 4110 | PFKCSMCKYASVEASKLKRH | CTCFL |
| | | | [11-30] | | | | [341-360] |
| 1 | 2788 | ELLHTFLAWKTSYLVLRPHD | ADAM2 | 19 | 4111 | DSLCPQVINAALTLAARPQS | CTNNA2 |
| | | | [245-264] | | | | [456-475] |
| 1 | 2789 | NKTLGTFSIAVAHHLGHNLG | ADAM29 | 19 | 4112 | FYEHIITVGTGQGSLLFYDI | DCAF12 |
| | | | [320-339] | | | | [348-367] |
| 1 | 2790 | IARRHPFLYAPTILLWAARY | AFP | 19 | 4113 | HGRLLSADTKGWVRLQFHAG | DPPA2 |
| | | | [166-185] | | | | [227-246] |
| 1 | 2791 | MAARAVFLALSAQLLQARLM | BAGE-1 | 19 | 4114 | NRQCQCTSVGAQNTVICSKL | EpCAM |
| | | | [1-20] | | | | [43-62] |
| 1 | 2792 | MAAGVVFLALSAQLLQARLM | BAGE-2 | 19 | 4115 | CSPGFFKFEASESPCLECPE | EPHA2 |
| | | | [1-20]; | | | | [276-295] |
| | | | BAGE-3 | | | | |
| | | | [1-20] | | | | |
| 1 | 2793 | MAAGAVFLALSAQLLQARLM | BAGE-5 | 19 | 4116 | GDFQEAMTHLQHKLICTRKP | FAM46D |
| | | | [1-20] | | | | [209-228] |
| 1 | 2794 | YKDAYKFAADVRLMFMNCYK | BRDT | 19 | 4117 | PQDQSCWAFLPDLCLCRVFW | FBXO39 |
| | | | [331-350] | | | | [10-29] |
| 1 | 2795 | ASQLASKMHSLLALMVGLLT | CAGE1 | 19 | 4118 | EQLKCLLDECILKQKSIIKL | FSIP1 |
| | | | [610-629] | | | | [406-425] |
| 1 | 2796 | WAICMLRVALATVYFQEEFL | CALR3 | 19 | 4119 | HEIFNLLSFTLNPLEGKLQQ | GASZ |
| | | | [9-28] | | | | [228-247] |
| 1 | 2797 | PEVLHMIYMRALQIVYGIRL | CDCA1 | 19 | 4120 | FSHSSHMLTTPTPMHPPSSL | GATA-3 |
| | | | [42-61] | | | | [410-429] |
| 1 | 2798 | PCEYYFRVYHSLCPISWVES | COX6B2 | 19 | 4121 | SSRRRELIQKLKSFISFYSA | Glypican- |
| | | | [55-74] | | | | 3 |
| | | | | | | | [385-404] |
| 1 | 2799 | EAARCMARDFVKHLKKKLKR | CT45 | 19 | 4122 | LHDPSGYLAEADLSYTWDFG | gp100 |
| | | | [168-187] | | | | [244-263] |
| 1 | 2800 | LIRKIYILMQNLGPLPNDVC | CT46 | 19 | 4123 | CYVNDIVLAILELLKYHQRV | HDAC1 |
| | | | [153-172] | | | | [151-170] |
| 1 | 2801 | HFVLLDMVHSLLHRLSHNDH | CT47 | 19 | 4124 | YGAGHPMKPHRLALTHSLVL | HDAC3 |
| | | | [120-139] | | | | [18-37] |
| 1 | 2802 | NYIDQFLLTSFPTFTSVGVL | CTAGE1 | 19 | 4125 | IGTGAVIIIFCIALILGAFF | IGFS11 |
| | | | [34-53] | | | | [247-266] |
| 1 | 2803 | FFAVLFLWRSFRSVTSRLYV | CTAGE2 | 19 | 4126 | CTNGSEVQSSWAETTYWISP | IL13RA2 |
| | | | [23-42] | | | | [113-132] |
| 1 | 2804 | HCDVCMFTSSRMSSFNRHMK | CTCFL | 19 | 4127 | MPKTGFLIIVLVMIAMEGGH | MAGE-A1 |
| | | | [258-277] | | | | [189-208] |
| 1 | 2805 | MNFYLLLASSILCALIVFWK | CXorf61 | 19 | 4128 | NMMGLYDGMEHLIYGEPRKL | MAGE-A10 |
| | | | [1-20] | | | | [251-270] |
| 1 | 2806 | AATVPATAAGVVAVVVPVPA | DBPC | 19 | 4129 | LGLVGAQALQAEEQEAAFFS | MAGE-A11 |
| | | | [15-34] | | | | [133-152] |
| 1 | 2807 | WVPTTHRRMISLFLLPACIF | DPPA2 | 19 | 4130 | FTKAEMLGSVIRNFQDFFPV | MAGE-A12 |
| | | | [249-268] | | | | [130-149] |
| 1 | 2808 | CSERVRTYWIIIELKHKARE | EpCAM | 19 | 4131 | LLGDNQVMPKTGLLIIVLAI | MAGE-A2 |
| | | | [135-154] | | | | [189-208] |
| 1 | 2809 | QYTEHFMAAGYTAIEKVVQM | EPHA2 | 19 | 4132 | LVHFLLLKYRAREPVTKAEM | MAGE-A3 |
| | | | [920-939] | | | | [116-135] |
| 1 | 2810 | YQPAPYFAAEARYPIYVIPE | FAM46D | 19 | 4133 | LLGDNQIMPKTGFLIIILAI | MAGE-A6 |
| | | | [349-368] | | | | [189-208] |
| 1 | 2811 | ETLIIAVLVSASIANLWLWM | FATE1 | 19 | 4134 | HAETSYEKVINYLVMLNARE | MAGE-A9 |
| | | | [162-181] | | | | [277-296] |
| 1 | 2812 | CSGSSYFVLANGHILPNSEN | FMR1NB | 19 | 4135 | DPPRFQFLWGPRAYAETSKM | MAGE-B2 |
| | | | [91-110] | | | | [267-286] |
| 1 | 2813 | TLELYTSYLYLSMAFYFNRD | FTHL17 | 19 | 4136 | DGNQSSAWTLPRNGLLMPLL | MAGE-B4 |
| | | | [26-45] | | | | [186-205] |
| 1 | 2814 | TGILWLLMNNCFLNLSPRKP | GAGE-1 | 19 | 4137 | SILKADMLKCVRREYKPYFP | MAGE-B6 |
| | | | [119-138] | | | | [215-234] |
| 1 | 2815 | SVDSNFQYGWTPLMYAASVA | GASZ | 19 | 4138 | DYFPVILKRAREFMELLFGL | MAGE-C2 |
| | | | [71-90] | | | | [176-195] |
| 1 | 2816 | FEFVGEFFTDVSLYILGSDI | Glypican- | 19 | 4139 | GSAATWGQDVTSVPVTRPAL | MUC-1 |
| | | | 3 | | | | [89-108] |
| | | | [142-161] | | | | |
| 1 | 2817 | GKTLCYLMPGFIHLVLQPSL | HAGE | 19 | 4140 | NVSCNQLDTGVPLLCEALCS | NLRP4 |
| | | | [291-310] | | | | [757-776] |
| 1 | 2818 | AKCVEFVKSFNLPMLMLGGG | HDAC1 | 19 | 4141 | PLGTPMLIEDGYAVTQAELF | NR6A1 |
| | | | [282-301] | | | | [265-284] |
| 1 | 2819 | EASGFCYVNDIVLAILELLK | HDAC2 | 19 | 4142 | AVTCGFHHIHEQIMEYIRKL | NY-BR-1 |
| | | | [147-166] | | | | [189-208] |
| 1 | 2820 | GECVEYVKSFNIPLLVLGGG | HDAC3 | 19 | 4143 | AEMDGAAAAKQVMALKDTIG | ODF2 |
| | | | [277-296] | | | | [214-233] |
| 1 | 2821 | ALINLNVIWMVTPLSNANQP | IGFS11 | 19 | 4144 | PMVMGPNTVGKASQPSFSIK | ODF3 |
| | | | [51-70] | | | | [145-164] |
| 1 | 2822 | GYLGYLYLQWQPPLSLDHFK | IL13RA2 | 19 | 4145 | AVFQCAQCHAVLADSVHLAW | OIP5 |
| | | | [44-63] | | | | [76-95] |
| 1 | 2823 | CDDSYHTFCLIPPLHDVPKG | JARID1B | 19 | 4146 | GFMITLSTDGVIICVAENIS | PASD1 |
| | | | [330-349] | | | | [43-62] |
| 1 | 2824 | DDAAPRVEGVPVAVHKHALH | KAAG1 | 19 | 4147 | ADIFAFGLTLWEMMTLSIPH | PBK |
| | | | [3-22] | | | | [228-247] |
| 1 | 2825 | CPDESWALKAIEALSGKIEL | KOC1 | 19 | 4148 | TFKLCHMYWNWPGTIRVPAP | PIWIL2 |
| | | | [44-63] | | | | [924-943] |
| 1 | 2826 | GIFIIVVFVYLTVENKSLFG | LEMD1 | 19 | 4149 | NNFTLAFIVVKKRINTRFFL | PIWIL3 |
| | | | [162-181] | | | | [752-771] |
| 1 | 2827 | KYSAHAFQFSPRNVLWLLVV | LIPI | 19 | 4150 | IPQHKLSLWPGFAISVSYFE | PIWIL4 |
| | | | [13-32] | | | | [235-254] |
| 1 | 2828 | VDPTGHSFVLVTSLGLTYDG | MAGE-A10 | 19 | 4151 | FDECGITDDQLLALLPSLSH | PRAME |
| | | | [194-213] | | | | [385-404] |
| 1 | 2829 | VALSRKMAELVHFLLLKYRA | MAGE-A12 | 19 | 4152 | AMNFDFPFKKGSGIPLLTTN | RAGE-1 |
| | | | [107-126] | | | | [234-253] |
| 1 | 2830 | FRAALSKKVADLIHFLLLKY | MAGE-A5 | 19 | 4153 | LEEDLQIATKTICQLTEEKE | SCP-1 |
| | | | [105-124] | | | | [341-360] |
| 1 | 2831 | VKDPVAWEAGMLMHFILRKY | MAGE-B1 | 19 | 4154 | SCHSFQSAYLIVDRDEAWVL | SCRN1 |
| | | | [104-123] | | | | [149-168] |
| 1 | 2832 | WTLPRNGLLMPLLSVIFLNG | MAGE-B4 | 19 | 4155 | CCSLDLLMKKIKGKDLQLLE | se57-1 |
| | | | [193-212] | | | | [85-104] |
| 1 | 2833 | FLWGPRAYAETTKMRVLRVL | MAGE-B6 | 19 | 4156 | KATEYLVIIGASEFLPIYLE | SLCO6A1 |
| | | | [357-376] | | | | [392-411] |
| 1 | 2834 | RRANGYRALMDKSLHVGTQC | MART1 | 19 | 4157 | GSDQHVASHLPLHPIMHNKP | SOX-6 |
| | | | [49-68] | | | | [32-51] |
| 1 | 2835 | PARWSFRAYTSVLYFNPWMR | MORC1 | 19 | 4158 | GDTFLLLIQSLKNNLIEKDP | SPAG1 |
| | | | [232-251] | | | | [847-866] |
| 1 | 2836 | VFCLTVVCWTWVPLRGPSSP | NA17-A | 19 | 4159 | KSDSPKSAQKFSLILKILSM | SPO11 |
| | | | [12-31] | | | | [101-120] |
| 1 | 2837 | NQKICIFVNHSTAPYSVKNK | NXF2 | 19 | 4160 | NQEKLCMLTAELLEYCNAPK | TDRD1 |
| | | | [189-208] | | | | [965-984] |
| 1 | 2838 | NTALHYAVYSEILSVVAKLL | NY-BR-1 | 19 | 4161 | PVWGLQLLLPLLLPSFIHFS | TEX101 |
| | | | [84-103] | | | | [230-249] |
| 1 | 2839 | MVILTILAIAPSVPFAANCF | NYD- | 19 | 4162 | LKRLSSFIGAGSPSLVKACD | TEX14 |
| | | | TSPG | | | | [1285-1304] |
| | | | [348-367] | | | | |
| 1 | 2840 | SRLLEFYLAMPFATPMEAEL | NY-ESO-1 | 19 | 4163 | LSKPIFCFVKDVHPDLEMND | TEX15 |
| | | | [85-104] | | | | [2511-2530] |
| 1 | 2841 | CLCDYKLYCLRPSLRELERK | ODF1 | 19 | 4164 | SRAAQMAVPSSRILQLSKPK | THEG |
| | | | [74-93] | | | | [256-275] |
| 1 | 2842 | LRAPAYSFRGAPMLLAENCS | ODF3 | 19 | 4165 | IALQEKESEIQLLKEHLCLA | TSGA10 |
| | | | [46-65] | | | | [583-602] |
| 1 | 2843 | IPVGFHLYSTHAALAALRGH | OIP5 | 19 | 4166 | AGCQKSEAPPIYLQVSSYQH | TSP50 |
| | | | [142-161] | | | | [332-351] |
| 1 | 2844 | FPTYDYFNQVTLQLLDGFMI | PASD1 | 19 | 4167 | ALLAGLVSLLCRHKRKQLPE | TYR |
| | | | [27-46] | | | | [490-509] |
| 1 | 2845 | ASQDPFPAAIILKVALNMAR | PBK | 19 | 4168 | PVETKAHFDSSEPQLLWDCD | ZNF165 |
| | | | [133-152] | | | | [165-184] |
| 1 | 2846 | EMELWMKAMLDAALVQTEPV | PEPP2 | 20 | 4169 | PILPPSLQTSYVFLGIVLAL | 5T4 |
| | | | [255-274] | | | | [346-365] |
| 1 | 2847 | PAPCQYAHKLAFLVGQSIHR | PIWIL1 | 20 | 4170 | FESFCQFTHYRCSNHVYYAK | ACRBP |
| | | | [829-848] | | | | [100-119] |
| 1 | 2848 | MRSVVGFVASINLTLTKWYS | PIWIL2 | 20 | 4171 | CDRRCLFQLETVAVTQMNKC | ACTL8 |
| | | | [754-773] | | | | [193-212] |
| 1 | 2849 | PAPCHYAHKLAYLVGQSIHQ | PIWIL3 | 20 | 4172 | KMCDANYAGGVVLHPRTISL | ADAM2 |
| | | | [850-869] | | | | [285-304] |
| 1 | 2850 | LNKQGMMMSIATKIAMQMTC | PIWIL4 | 20 | 4173 | CSQPRCIMHEGNPPITKFSN | ADAM29 |
| | | | [582-601] | | | | [349-368] |
| 1 | 2851 | LCSIDWFMVTVHPFMLNNDV | PLAC1 | 20 | 4174 | TLHRNEYGIASILDSYQCTA | AFP |
| | | | [29-48] | | | | [20-39] |
| 1 | 2852 | HLERLAYLHARLRELLCELG | PRAME | 20 | 4175 | DILCPKAKRTSRFLSGIINF | CDCA1 |
| | | | [456-475] | | | | [108-127] |
| 1 | 2853 | NASGAHALQPAAAILALLPA | PSCA | 20 | 4176 | APPWEQDYRMMFPPPGQSYP | CTAGE2 |
| | | | [84-103] | | | | [565-584] |
| 1 | 2854 | EKKIMHYMYQLCKSLDHIHR | RAGE-1 | 20 | 4177 | KGAKGTFHCDVCMFTSSRMS | CTCFL |
| | | | [102-121] | | | | [251-270] |
| 1 | 2855 | PTGLINMAATPIPAMSARDL | SAGE1 | 20 | 4178 | PHCRDEMAAARGALKKNATM | CTNNA2 |
| | | | [179-198] | | | | [200-219] |
| 1 | 2856 | KRCQHKIAEMVALMEKHKHQ | SCP-1 | 20 | 4179 | TKCNTLFVVDVQTSQITKIP | DCAF12 |
| | | | [701-720] | | | | [107-126] |
| 1 | 2857 | QVPRTYAIMISRPAWLWGAE | SCRN1 | 20 | 4180 | KVCRDTLRDWCQQLGLSTNG | DPPA2 |
| | | | [61-80] | | | | [94-113] |
| 1 | 2858 | YKLPLFIAFIFSTLIFSGFS | SLCO6A1 | 20 | 4181 | SKLAAKCLVMKAEMNGSKLG | EpCAM |
| | | | [576-595] | | | | [60-79] |
| 1 | 2859 | EEAVMYYTRSISALPTVVAY | SPAG1 | 20 | 4182 | ERYMCSRFFIDFPHIEEQQK | FAM46D |
| | | | [226-245] | | | | [259-278] |
| 1 | 2860 | TGKLGFSFVRITALMVSCNR | SPAG9 | 20 | 4183 | WASPQNFTSVCEELVNNVED | GASZ |
| | | | [1138-1157] | | | | [392-411] |
| 1 | 2861 | VEHPQMTFGRLHRIIPKIMP | SSX-1 | 20 | 4184 | IDKYWREYILSLEELVNGMY | Glypican- |
| | | | [94-113] | | | | 3 |
| | | | | | | | [292-311] |
| 1 | 2862 | EKIVYVYMKLNYEVMTKLGF | SSX-4 | 20 | 4185 | GTATLRLVKRQVPLDCVLYR | gp100 |
| | | | [44-63] | | | | [460-479] |
| 1 | 2863 | EHPQMTFGRLQGIFPKITPE | SSX-5 | 20 | 4186 | HYGLYKKMIVFKPYQASQHD | HDAC3 |
| | | | [95-114] | | | | [38-57] |
| 1 | 2864 | PHPGTVISHSVAMLILIGSL | TAG-1 | 20 | 4187 | GRQCVEHYRLLHRYCVFSHD | JARID1B |
| | | | [1019-1038] | | | | [611-630] |
| 1 | 2865 | LPASTLSRLSNALLLRLECN | TAG-2a | 20 | 4188 | TGAVGMACAISILLKDLADE | LDHC |
| | | | [37-56] | | | | [28-47] |
| 1 | 2866 | YLPGYRYLNSWRPSLFYKIA | TEKT5 | 20 | 4189 | GASLDNFHFIGVSLGAHISG | LIPI |
| | | | [40-59] | | | | [168-187] |
| 1 | 2867 | AMIGCRLMSGILAVGPMFVR | TEX101 | 20 | 4190 | LESLFRAVITKKVADLVGFL | MAGE-A1 |
| | | | [187-206] | | | | [94-113] |
| 1 | 2868 | LTGATQMAYLGSLPVIGEKE | TEX14 | 20 | 4191 | AQIACSSPSVVASLPLDQSD | MAGE-A10 |
| | | | [221-240] | | | | [87-106] |
| 1 | 2869 | TLYFYKFFLPTILSLSFFIL | TMEM31 | 20 | 4192 | LGDNQIVPKTGLLIIVLAII | MAGE-A12 |
| | | | [132-151] | | | | [190-209] |
| 1 | 2870 | GFLEKEFYHKTNIKMRCEFL | TRAG-3 | 20 | 4193 | YLQLVFGIEVVEVVPISHLY | MAGE-A2 |
| | | | [18-37] | | | | [157-176] |
| 1 | 2871 | APSRTLLLALPLPLSLLAAL | TSP50 | 20 | 4194 | IGHLYIFATCLGLSYDGLLG | MAGE-A3 |
| | | | [366-385] | | | | [172-191] |
| 1 | 2872 | HLCKIMLFFRSNPYFQNKVI | TSPY1 | 20 | 4195 | IWKFMNVLGAYDGEEHLIYG | MAGE-B1 |
| | | | 197-216] | | | | [220-239] |
| 1 | 2873 | KGAATKMAAVTAPEAESAPA | VCX | 20 | 4196 | CATEEKIWEFLNKMRIYDGK | MAGE-B3 |
| | | | [53-72] | | | | [217-236] |
| 1 | 2874 | DVRDLNALLPAVPSLGGGGG | WT1 | 20 | 4197 | RLSKDAVKKKACTLAQFLQK | MAGE-B6 |
| | | | [4-23] | | | | [189-208] |
| 1 | 2875 | SRQKKIRIQLRSQCATWKVI | XAGE-1 | 20 | 4198 | RYTGYFPVIFRKAREFIEIL | MAGE-C1 |
| | | | [20-39]; | | | | [941-960] |
| | | | XAGE-1b | | | | |
| | | | [20-39] | | | | |
| 1 | 2876 | CKECGRAFNLNSHLIRHQRI | ZNF165 | 20 | 4199 | ARWSFRAYTSVLYFNPWMRI | MORC1 |
| | | | [402-421] | | | | [233-252] |
| 2 | 2877 | PTSSASSFSSSAPFLASAVS | 5T4 | 20 | 4200 | QSGAGVPGWGIALLVLVCVL | MUC-1 |
| | | | [34-53] | | | | [1151-1170] |
| 2 | 2878 | SVWLGASVVAHLSTYQSEWM | ACTL8 | 20 | 4201 | LVANFEKARRAHWIFLGCFL | NLRP4 |
| | | | [336-355] | | | | [484-503] |
| 2 | 2879 | VFQLIGLTNAIFVSFNITII | ADAM2 | 20 | 4202 | QLNKRYWYICQDFTEYKYTH | NR6A1 |
| | | | [205-224] | | | | [413-432] |
| 2 | 2880 | ETFMNKFIYEIARRHPFLYA | AFP | 20 | 4203 | DQSAYVSAIRDCFPKLLRLD | NXF2 |
| | | | [156-175] | | | | [338-357] |
| 2 | 2881 | SGQMVEHLMNSVMKLCVIIA | AKAP-3 | 20 | 4204 | TRKDCLAKHLKHMRRMYGTS | NYD-TSPG |
| | | | [666-685] | | | | [154-173] |
| 2 | 2882 | AVLQWIAASQFNVPMLYFMG | AKAP-4 | 20 | 4205 | IDTSNSEAISSSSIPQFPIT | PASD1 |
| | | | [776-795] | | | | [656-675] |
| 2 | 2883 | RCIIILVLQEPTAFRISVTS | BAGE-2 | 20 | 4206 | KELTPTSPDCLRYYNILFRR | PIWIL3 |
| | | | [60-79] | | | | [212-231] |
| 2 | 2884 | SVTSSCFVQNTLTKLLKDRR | BAGE-3 | 20 | 4207 | LETWGLHFGSQISLTGRIVP | PIWIL4 |
| | | | [76-95]; | | | | [431-450] |
| | | | BAGE-2 | | | | |
| | | | [76-95] | | | | |
| 2 | 2885 | MLAKKHFSYAWPFYNPVDVN | BRDT | 20 | 4208 | VLPGLAYLATADMPAMSTRD | SAGE1 |
| | | | [283-302] | | | | [366-385] |
| 2 | 2886 | CKVDGFTHLYTLILRPDLSY | CALR3 | 20 | 4209 | MIGYALGYVLGAPLVKVPEN | SLCO6A1 |
| | | | [163-182] | | | | [275-294] |
| 2 | 2887 | CCHPSNFIIEAPGHMSDVEW | CCDC62 | 20 | 4210 | FVRITALMVSCNRLWVGTGN | SPAG9 |
| | | | [515-534] | | | | [1145-1164] |
| 2 | 2888 | IRLEHFYMMPVNSEVMYPHL | CDCA1 | 20 | 4211 | KKLWDTFHVPVFTLVDADPH | SPO11 |
| | | | [59-78] | | | | [262-281] |
| 2 | 2889 | NCYQNFLDYHRCLKTRTRRG | COX6B2 | 20 | 4212 | EDVPLAAKLVDLPCVIESLR | TAF7L |
| | | | [31-50] | | | | [145-164] |
| 2 | 2890 | VGHYTQLVWYSTYQVGCGIA | CRISP2 | 20 | 4213 | GYVDYGNFEILSLMRLCPII | TDRD1 |
| | | | [134-153] | | | | [575-594] |
| 2 | 2891 | PTAVRKRFFESIIKEAARCM | CT45 | 20 | 4214 | QDTLQLLVMTKCRLEHELAI | TEKT5 |
| | | | [154-173] | | | | [437-456] |
| 2 | 2892 | HAAARNLWGNLPPLLLPQRL | CT47 | 20 | 4215 | AFCELQTYHDQLVELLEETK | TEX15 |
| | | | [155-174] | | | | [1755-1774] |
| 2 | 2893 | MFVIISLHNCVVISFVLFLF | CTAGE1 | 20 | 4216 | IKLLRNIPRWTHLLALLRLI | TPTE |
| | | | [1-20] | | | | [181-200] |
| 2 | 2894 | VRREKKFAVALSGLIEEKCK | CTAGE2 | 20 | 4217 | WVLTVAHCLIWRDVIYSVRV | TSP50 |
| | | | [42-61] | | | | [147-166] |
| 2 | 2895 | HICHTRFTQSGTMKIHILQK | CTCFL | 20 | 4218 | STPMFNDINIYDLFVWMHYY | TYR |
| | | | [401-420] | | | | [163-182] |
| 2 | 2896 | HISDSFLETNVPLLVLIEAA | CTNNA2 | 20 | 4219 | PFMCAYPGCNKRYFKLSHLQ | WT1 |
| | | | [387-406] | | | | [322-341] |
| 2 | 2897 | MLRLLRLALAFYGRTADPAE | CXorf48 | 20 | 4220 | HDGCERRLNLNSNEFTHQKS | ZNF165 |
| | | | [1-20] | | | | [272-291] |
| 2 | 2898 | RWCPPPFFYRRRFVRGPRPP | DBPC | 1 | 4221 | VESTPMIMENIQELIRSAQE | ACRBP |
| | | | [222-241] | | | | [275-294] |
| 2 | 2899 | VLAFGLLLAAATATFAAAQE | EpCAM | 1 | 4222 | LNWEGVQYLWSFVLENHRRE | ACTL8 |
| | | | [6-25] | | | | [73-92] |
| 2 | 2900 | WDLMQNIMNDMPIYMYSVCN | EPHA2 | 1 | 4223 | DEVSFYANRLTNLVIAMARK | AKAP-3 |
| | | | [52-71] | | | | [122-141] |
| 2 | 2901 | VPKQMMQMFGLGAISLILVC | FMR1NB | 1 | 4224 | IDDLSFYVNRLSSLVIQMAH | AKAP-4 |
| | | | [180-199] | | | | [214-233] |
| 2 | 2902 | ACGLYYKLHNINRPLTMKKE | GATA-3 | 1 | 4225 | RTKKELASALKSALSGHLET | ANXA2 |
| | | | [341-360] | | | | [78-97] |
| 2 | 2903 | IQKLKSFISFYSALPGYICS | Glypican- | 1 | 4226 | PSNINQFAAAYFQELTMYRG | CABYR |
| | | | 3 | | | | [30-49] |
| | | | [392-411] | | | | |
| 2 | 2904 | LLVLMAVVLASLIYARRLMK | gp100 | 1 | 4227 | SPASELIAIQDSHSLGSSKS | CCDC62 |
| | | | [603-622] | | | | [566-585] |
| 2 | 2905 | NDLQMSNFVNLKNITYLVLD | HAGE | 1 | 4228 | EGKDPAFTALLTTQLQVQRE | CRISP2 |
| | | | [377-396] | | | | [20-39] |
| 2 | 2906 | ASGFCYVNDIVLAILELLKY | HDAC1 | 1 | 4229 | FAVLFFLWRSFRSVRSRLYV | cTAGE5 |
| | | | [147-166] | | | | [53-72] |
| 2 | 2907 | GAESGRYYCLNVPLRDGIDD | HDAC3 | 1 | 4230 | KKNATMLYTASQAFLRHPDV | CTNNA2 |
| | | | [210-229] | | | | [214-233] |
| 2 | 2908 | TVTIRNISALSSGLYQCVAS | IGFS11 | 1 | 4231 | NEDNIYISNSIYFSIAIVSE | CXorf48 |
| | | | [199-218] | | | | [122-141] |
| 2 | 2909 | YKLRYRYTLDDLYPMMNALK | JARID1B | 1 | 4232 | SRVLHGYAAQQLPSLLKERE | DCAF12 |
| | | | [730-749] | | | | [64-83] |
| 2 | 2910 | LHDGLRQVAGPGAAAAHLPR | KAAG1 | 1 | 4233 | NLLRGIDSLFSAPMDFRGLP | DKKL1 |
| | | | [21-40] | | | | [63-82] |
| 2 | 2911 | GTGAVGMACAISILLKDLAD | LDHC | 1 | 4234 | IAERQRVMAAQVALRRQQAQ | DMRT1 |
| | | | [27-46] | | | | [108-127] |
| 2 | 2912 | STRKLYEKKLVQLLVSPPCA | LEMD1 | 1 | 4235 | KRDNRVAYMNPIAMARWRGP | FAM133A |
| | | | [29-48] | | | | [3-22] |
| 2 | 2913 | DYFPEIFREASVCMQLLFGI | MAGE-A11 | 1 | 4236 | EHLEVKFMNPYNAVLTKKFQ | FBXO39 |
| | | | [258-277] | | | | [90-109] |
| 2 | 2914 | FQDFFPVIFSKASEYLQLVF | MAGE-A12 | 1 | 4237 | ISDTKDYFMSKTLGIGRLKR | FSIP1 |
| | | | [143-162] | | | | [515-534] |
| 2 | 2915 | PPQSPQGASALPTTISFTCW | MAGE-A4 | 1 | 4238 | MSWRGRSTYRPRPRRYVEPP | GAGE-2 |
| | | | [62-81] | | | | [1-20]; |
| | | | | | | | GAGE-1 |
| | | | | | | | [1-20]; |
| | | | | | | | GAGE-8 |
| | | | | | | | [1-20] |
| 2 | 2916 | LKSPQGASAIPTAIDFTLWR | MAGE-A5 | 1 | 4239 | SRGKSTYYWPRPRRYVQPPE | GAGE-3 |
| | | | [62-81] | | | | [4-23] |
| 2 | 2917 | FLWGPRAYAETSKMKVLEFL | MAGE-B2 | 1 | 4240 | WRGRSTYYWPRPRRYVQPPE | GAGE-6 |
| | | | [273-292] | | | | [3-22]; |
| | | | | | | | GAGE-7 |
| | | | | | | | [3-22] |
| 2 | 2918 | PREDAHFIYGYPKKGHGHSY | MART | 1 | 4241 | ALSRHMSSLSHISPFSHSSH | GATA-3 |
| | | | [2-21] | | | | [396-415] |
| 2 | 2919 | KFRPGSVVVQLTLAFREGTI | MUC-1 | 1 | 4242 | DGGNKHFLRNQPLTFALQLH | gp100 |
| | | | [1093-1112] | | | | [226-245] |
| 2 | 2920 | MVLPDVFIRCVVFCLTVVCW | NA17-A | 1 | 4243 | KKVNFLDMSLDDIIIYKELE | HOM-TES-85 |
| | | | [1-20] | | | | [21-40] |
| 2 | 2921 | QYIPHLFSYSGHSPLLPQQA | NR6A1 | 1 | 4244 | IQNHDIMHAIISPLRSANTV | KU-CT-1 |
| | | | [224-243] | | | | [435-454] |
| 2 | 2922 | GQSQGSVLAFTRTFIATPGS | NXF2 | 1 | 4245 | PDSRLLQLHITMPFSSPMEA | Lage-1 |
| | | | [509-528] | | | | [83-102] |
| 2 | 2923 | LLKEFTVSGNILTIRLTAAD | NY-ESO-1 | 1 | 4246 | QRNVAIMKSIIPAIVHYSPD | LDHC |
| | | | [122-141] | | | | [111-130] |
| 2 | 2924 | EKDVTYSYGLGSCVKIESPC | ODF1 | 1 | 4247 | VKVLEYVIKVSARVRFFFPS | MAGE-A1 |
| | | | [183-202] | | | | [277-296] |
| 2 | 2925 | PPTTGFMKHTPTKLRAPAYS | 0DF3 | 1 | 4248 | DPTSHSYVLVTSLNLSYDGI | MAGE-A11 |
| | | | [33-52] | | | | [283-302] |
| 2 | 2926 | SNRIHTSAHVMSMGLLHFYK | ODF4 | 1 | 4249 | GREDSVFAHPRKLLMQDLVQ | MAGE-A2 |
| | | | [121-140] | | | | [233-252] |
| 2 | 2927 | SLGAVVFSRVTNNVVLEAPF | OIP5 | 1 | 4250 | FPVIFSKASSSLQLVFGIEL | MAGE-A3 |
| | | | [100-119] | | | | [147-166] |
| 2 | 2928 | DGPDTKRVCLRNEEQMKLPA | PAGE1 | 1 | 4251 | VNARVRIAYPSLREAALLEE | MAGE-A4 |
| | | | [77-96] | | | | [294-313] |
| 2 | 2929 | GLTLWEMMTLSIPHINLSND | PBK | 1 | 4252 | KKLLTQYFVQENYLEYRQVP | MAGE-A6 |
| | | | [234-253] | | | | [243-262] |
| 2 | 2930 | NRKYAFKAAHPNMRTYYFCT | PEPP2 | 1 | 4253 | RAPEEAIWEALSVMGLYDGR | MAGE-A8 |
| | | | [231- 250] | | | | [218-237] |
| 2 | 2931 | GKQQTVMAIATKIALQMNCK | PIWIL1 | 1 | 4254 | PAQLEFMFQEALKLKVAELV | MAGE-A9 |
| | | | [592-611] | | | | [97-116] |
| 2 | 2932 | CLRYYNILFRRTFKLLDFEQ | PIWIL3 | 1 | 4255 | SSDPPRFQFLWGPRAYAETS | MAGE-B2 |
| | | | [221-240] | | | | [265-284] |
| 2 | 2933 | YFERKLLFSADVSYKVLRNE | PIWIL4 | 1 | 4256 | LIMKTNMLVQFLMEMYKMKK | MAGE-B3 |
| | | | [252-271] | | | | [111-130] |
| 2 | 2934 | FKFIGLMILLTSAFSAGSGQ | PLAC1 | 1 | 4257 | RPVSSFFSYTLASLLQSSHE | MAGE-C1 |
| | | | [4-23] | | | | [777-796] |
| 2 | 2935 | RHSQTLKAMVQAWPFTCLPL | PRAME | 1 | 4258 | ATVMASESLSVMSSNVSFSE | MAGE-C2 |
| | | | [64-83] | | | | [354-373] |
| 2 | 2936 | PGSPRSWLLLCPLSHVLFRA | PRSS55 | 1 | 4259 | EIYNEYIYDLFVPVSSKFQK | MPHOSPH1 |
| | | | [330-349] | | | | [277-296] |
| 2 | 2937 | MAGLALQPGTALLCYSCKAQ | PSCA | 1 | 4260 | GVSFFFLSFHISNLQFNSSL | MUC-1 |
| | | | [1-20] | | | | [1039-1058] |
| 2 | 2938 | QVRGGMVFELANSIVLPFDC | PSMA | 1 | 4261 | EEAFSRASLVSVYNSYPYYP | NKX3.1 |
| | | | [578-597] | | | | [202-221] |
| 2 | 2939 | AASDNVFSTVPPAFINMAAT | SAGE1 | 1 | 4262 | SLLRKKMLPEASLLIAIKPV | NLRP4 |
| | | | [592-611] | | | | [263-282] |
| 2 | 2940 | EDANSCHSFQSAYLIVDRDE | SCRN1 | 1 | 4263 | IERLIYLYHKFHQLKVSNEE | NR6A1 |
| | | | [145-164] | | | | [369-388] |
| 2 | 2941 | LWTWWINFLFAAVVAWCTLI | SLCO6A1 | 1 | 4264 | ADKDLYVAEALSTLESWRSR | ODF2 |
| | | | [311-330] | | | | [428-447] |
| 2 | 2942 | QFIPSTMAAAAASGLSPLQL | SOX-6 | 1 | 4265 | NSPLPFQWRITHSFRWMAQV | ODF4 |
| | | | [306-325] | | | | [63-82] |
| 2 | 2943 | KGIVLVALADGTLAIFHRGV | SPAG9 | 1 | 4266 | MGFLARLIYARRPMIYVESS | PAGE1 |
| | | | [1010-1029] | | | | [1-20] |
| 2 | 2944 | MIITTWIVYILARKGVGLPF | SPATA19 | 1 | 4267 | GPDMEAFQQELALLKIEDEP | PAGE2 |
| | | | [1-20] | | | | [65-84] |
| 2 | 2945 | DSILRAPYVTCQPFWRKEME | SPO11 | 1 | 4268 | RGDGQEAPDVVAFVAPGESQ | PAGE4 |
| | | | [340-359] | | | | [12-31] |
| 2 | 2946 | FLKDHRISTFKNWPFLEGCA | Survivin | 1 | 4269 | GTDVEAFQQELALLKIEDAP | PAGE5 |
| | | | [13-32] | | | | [84-103] |
| 2 | 2947 | VTGYKMLYQNDLHLTPTLHL | TAG-1 | 1 | 4270 | KNTPGIYTSLVNYNLWIEKV | PRSS55 |
| | | | [944-963] | | | | [279-298] |
| 2 | 2948 | ECNVVIIAHCNLEPLVSRDP | TAG-2a | 1 | 4271 | SNPIVLRMMNDQLMFLERAF | PSMA |
| | | | [54-73] | | | | [656-675] |
| 2 | 2949 | IPVWGLQLLLPLLLPSFIHF | TEX101 | 1 | 4272 | GSTGFSSRLAATQDLPFIHQ | RCAS1 |
| | | | [229-248] | | | | [123-142] |
| 2 | 2950 | EPTFSFFSGPYMVMTNLVWN | TEX14 | 1 | 4273 | KDSITVFVSNLPYSMQEPDT | SART3 |
| | | | [247-266] | | | | [701-720] |
| 2 | 2951 | GLPIILHLFALSTLYFYKFF | TMEM31 | 1 | 4274 | KLNQEYSQQFLTLFQQWDLD | SCP3a |
| | | | [120-139] | | | | [120-139] |
| 2 | 2952 | KIKKIVHSIVSSFAFGLFGV | TPTE | 1 | 4275 | TSELKTEGVSPYLMLIRLRK | se57-1 |
| | | | [80-99] | | | | [316-335] |
| 2 | 2953 | IKMRCEFLACWPAFTVLGEA | TRAG-3 | 1 | 4276 | KERQLSTMITQLISLREQLL | SOX-6 |
| | | | [30-49] | | | | [187-206] |
| 2 | 2954 | QNYSSNAYHMSSTMKPNTKC | TSGA10 | 1 | 4277 | PDNIPAFAAAYFESLLEKRE | SP17 |
| | | | [651-670] | | | | [32-51] |
| 2 | 2955 | IWRDIDFAHEAPAFLPWHRL | TYR | 1 | 4278 | KKMKTSESSTILVVRYRRNV | SPAN-Xc |
| | | | [194-213] | | | | [40-59] |
| 2 | 2956 | ASSGQARMFPNAPYLPSCLE | WT1 | 1 | 4279 | TRIQFIRWSHTRIFQVPSEM | SPATA19 |
| | | | [120-139] | | | | [112-131] |
| 2 | 2957 | KKIRIQLRSQCATWKVICKS | XAGE-1c | 1 | 4280 | AEIQALTFLSSDYLSRVYLP | SPO11 |
| | | | [102-121] | | | | [368-387] |
| 3 | 2958 | LRRLELASNHFLYLPRDVLA | 5T4 | 1 | 4281 | VERPQMTFGRLQGISPKIMP | SSX-2 |
| | | | [212-231] | | | | [94-113] |
| 3 | 2959 | CDTDYIQYPNYCSFKSQQCL | ACRBP | 1 | 4282 | QRPQMTFGRLQGIFPKIMPK | SSX-3 |
| | | | [477-496] | | | | [95-114] |
| 3 | 2960 | WNEPQMVFPNIVNYLPCKEN | ACTL8 | 1 | 4283 | EFEETAKKVRRAIEQLAAMD | Survivin |
| | | | [22-41] | | | | [123-142] |
| 3 | 2961 | RYIENIYHSKPMRWPFFLFI | ADAM2 | 1 | 4284 | LFLRSQEAAATVQLFQEEHR | SYCE1 |
| | | | [674-693] | | | | [229-248] |
| 3 | 2962 | PRCIIILVLQEPTPFRISVT | BAGE-3 | 1 | 4285 | ESGQYRANEGTSSIVMEIQK | TAF7L |
| | | | [59-78] | | | | [377-396] |
| 3 | 2963 | ECIEDFNTMFSNCYLYNKPG | BRDT | 1 | 4286 | SSEVLEYMNQLSASLKETYA | TDRD1 |
| | | | [93-112] | | | | [285-304] |
| 3 | 2964 | EACRETYMEFLWQYKSSADK | CDCA1 | 1 | 4287 | GKINQNYASIITEAFPKPKD | TEX15 |
| | | | [132-151] | | | | [368-387] |
| 3 | 2965 | TRRGKSTQPCEYYFRVYHSL | COX632 | 1 | 4288 | VSRAAQMAVPSSRILQLSKP | THEG |
| | | | [47-66] | | | | [255-274] |
| 3 | 2966 | NQDSLKYYYVCQYCPAGNNM | CRISP2 | 1 | 4289 | DLDLTYVTERIIAMSFPSSG | TPTE |
| | | | [157-176] | | | | [236-255] |
| 3 | 2967 | ECYQFKFKYTNNGPLMDFIS | CT46 | 1 | 4290 | EELQKVQFEKVSALADLSST | TSGA10 |
| | | | [113-132] | | | | [492-511] |
| 3 | 2968 | VVARRYPASGIHFVLLDMVH | CT47 | 1 | 4291 | HNRESYMVPFIPLYRNGDFF | TYR |
| | | | [109-128] | | | | [420-439] |
| 3 | 2969 | WELVIRAAVAGFFAVLFLWR | CTAGE2 | 1 | 4292 | QTPGINLDLGSGVKVKIIPK | XAGE-1c |
| | | | [12-31] | | | | [125-144]; |
| | | | | | | | XAGE-1 |
| | | | | | | | [46-65]; |
| | | | | | | | XAGE-1b |
| | | | | | | | [46-65] |
| 3 | 2970 | CNDCNMAFVTSGELVAHRRY | CTCFL | 1 | 4293 | SRQKKIRIQLRSQVLGREMR | XAGE-1d |
| | | | [315-334] | | | | [20-39] |
| 3 | 2971 | SSILCALIVFWKYRRFQRNT | CXorf61 | 1 | 4294 | MSWRGRSTYRPRPRRSLQPP | XAGE-2 |
| | | | [9-28] | | | | [1-20] |
| 3 | 2972 | ADKPVLAIQVLGTVKWFNVR | DBPC | 1 | 4295 | MIWRGRSTYRPRPRRSVPPP | XAGE-3 |
| | | | [85-104] | | | | [1-20] |
| 3 | 2973 | VLLLLLSTLVIPSAAAPIHD | DKKL1 | 2 | 4296 | SHKTPFVSPLLASQSLSIGN | ACRBP |
| | | | [16-35] | | | | [399-418] |
| 3 | 2974 | CKKCNLIAERQRVMAAQVAL | DMRT1 | 2 | 4297 | RIVEIVVVIDNYLYIRYERN | ADAM29 |
| | | | [102-121] | | | | [198-217] |
| 3 | 2975 | TNTVEVITSAPGAMLASWAR | DPPA2 | 2 | 4298 | STPPSAYGSVKAYTNFDAER | ANXA2 |
| | | | [172-191] | | | | [18-37] |
| 3 | 2976 | MNDMPIYMYSVCNVMSGDQD | EPHA2 | 2 | 4299 | QLLQARLMKEESPVVSWRLE | BAGE-1 |
| | | | [59-78] | | | | [13-32]; |
| | | | | | | | BAGE-2 |
| | | | | | | | [13-32]; |
| | | | | | | | BAGE-3 |
| | | | | | | | [13-32]; |
| | | | | | | | BAGE-5 |
| | | | | | | | [13-32] |
| 3 | 2977 | IWILLFVCYYLSYYLCSGSS | FMR1NB | 2 | 4300 | AKYSSVYMEAEATALLSDTS | CABYR |
| | | | [76-95] | | | | [372-391] |
| 3 | 2978 | YYWPRPRRYVQPPEMIGPMR | GAGE-7 | 2 | 4301 | ENHPKSMTMMPALFKENRND | CAGE1 |
| | | | [9-28] | | | | [756-775] |
| 3 | 2979 | HHPGLSHSYMDAAQYPLPEE | GATA-3 | 2 | 4302 | ATAQLQRTPMSALVFPNKIS | CT46 |
| | | | [27-46] | | | | [2-21] |
| 3 | 2980 | GECCKYSYKGLRSVCVYGGG | HAGE | 2 | 4303 | ALKKLIHAAKLNASLKTLEG | cTAGE5 |
| | | | [334-353] | | | | [312-331]; |
| | | | | | | | CTAGE2 |
| | | | | | | | [282-301] |
| 3 | 2981 | ISKVMEMYQPSAVVLQCGAD | HDAC2 | 2 | 4304 | NTGEMSSNSTALALVRPSSS | CXorf61 |
| | | | [246-265] | | | | [27-46] |
| 3 | 2982 | KPHRLALTHSLVLHYGLYKK | HDAC3 | 2 | 4305 | GQGSLLFYDIRAQRFLEERL | DCAF12 |
| | | | [25-44] | | | | [358-377] |
| 3 | 2983 | AVLPCTFTTSAALINLNVIW | IGFS11 | 2 | 4306 | TELHPRVAFWIIKLPARRSH | DKKL1 |
| | | | [40-59] | | | | [161-180] |
| 3 | 2984 | QDMDCVYYNWQYLLCSWKPG | IL13RA2 | 2 | 4307 | SDSTYYSSFYQPSLFPYYNN | DMRT1 |
| | | | [141-160] | | | | [205-224] |
| 3 | 2985 | QCAGEFVITFPRAYHSGFNQ | JARID1B | 2 | 4308 | GKKIEVYLRLHRHAYPEQRQ | DPPA2 |
| | | | [573-592] | | | | [113-132] |
| 3 | 2986 | GVPVAVHKHALHDGLRQVAG | KAAG1 | 2 | 4309 | EKEKDVRSLSKKRKKSYPDD | FAM133A |
| | | | [11-30] | | | | [168-187] |
| 3 | 2987 | PVSGPFLVKTGYAFVDCPDE | KOC1 | 2 | 4310 | RRQFEFSVDSFQIVLDPMLD | FAM46D |
| | | | [28-47] | | | | [166-185] |
| 3 | 2988 | PDFSMYVYEVTKSILPITNI | KU-CT-1 | 2 | 4311 | EVMARQLYAVNARLRALEEQ | FATE1 |
| | | | [721-740] | | | | [135-154] |
| 3 | 2989 | LHITMPFSSPMEAELVRRIL | Lage-1 | 2 | 4312 | NLKVNFFFERIMKYERLARI | FBXO39 |
| | | | [90-109] | | | | [282-301] |
| 3 | 2990 | PRIETILMMYTRNNLNCAEP | LIPI | 2 | 4313 | KLQELSAASPTISSFSPRLE | FSIP1 |
| | | | [60-79] | | | | [326-345] |
| 3 | 2991 | DPACYEFLWGPRALVETSYV | MAGE-A3 | 2 | 4314 | GWESGLVAMESAFHLEKNVN | FTHL17 |
| | | | [265-284] | | | | [93-112] |
| 3 | 2992 | PDPESVFRAALSKKVADLIH | MAGE-A5 | 2 | 4315 | EEMRSHYVAQTGILWLLMNN | GAGE-1 |
| | | | [99-118] | | | | [109-128] |
| 3 | 2993 | AALSRKVAKLVHFLLLKYRA | MAGE-A6 | 2 | 4316 | MNLSRGKSTYYWPRPRRYVQ | GAGE-3 |
| | | | [107-126] | | | | [1-20] |
| 3 | 2994 | DPAGHSYILVTALGLSCDSM | MAGE-A9 | 2 | 4317 | MSWRGRSTYYWPRPRRYVQP | GAGE-6 |
| | | | [169-188] | | | | [1-20]; |
| | | | | | | | GAGE-7 |
| | | | | | | | [1-20] |
| 3 | 2995 | ALPKSGLLMSLLVVIFMNGN | MAGE-B6 | 2 | 4318 | EKFKKAMTIGDVSLVQELLD | GASZ |
| | | | [281-300] | | | | [48-67] |
| 3 | 2996 | KVVEFLAMLKNTVPITFPSS | MAGE-C1 | 2 | 4319 | KPHRIRMTHNLLLNYGLYRK | HDAC2 |
| | | | [1083-1102] | | | | [32-51]; |
| | | | | | | | HDAC1 |
| | | | | | | | [31-50] |
| 3 | 2997 | AGREHFVYGEPRELLTKVWV | MAGE-C2 | 2 | 4320 | MASFRKLTLSEKVPPNHPSR | HOM-TES-85 |
| | | | [260-279] | | | | [1-20] |
| 3 | 2998 | IGCWYCRRANGYRALMDKSL | MART1 | 2 | 4321 | PIRSSYFTFQLQNIVKPLPP | IL13RA2 |
| | | | [43-62] | | | | [222-241] |
| 3 | 2999 | AYTSVLYFNPWMRIFIQAKR | MORC1 | 2 | 4322 | YENDIASMNLQAHLIPGLNL | KOC1 |
| | | | [239-258] | | | | [351-370] |
| 3 | 3000 | LVALAIVYLIALAVCQCRRK | MUC-1 | 2 | 4323 | ATVLTNMAMQEPLRLNIQNH | KU-CT-1 |
| | | | [1170-1189] | | | | [419-438] |
| 3 | 3001 | GSYRKWMCFSESQVQPTQKQ | NA17-A | 2 | 4324 | GAVLKDFTVSGNLLFMSVRD | Lage-1 |
| | | | [32-51] | | | | [120-139] |
| 3 | 3002 | SLVSVYNSYPYYPYLYCVGS | NKX3.1 | 2 | 4325 | AQFYNDFVNISSIGLTYFQS | LIPI |
| | | | [209-228] | | | | [409-428] |
| 3 | 3003 | ESSYVFLHVCIQEFCAALFY | NLRP4 | 2 | 4326 | VSARVRFFFPSLREAALREE | MAGE-A1 |
| | | | [445-464] | | | | [286-305] |
| 3 | 3004 | AFREQYMGMSVPPHYQYIPH | NR6A1 | 2 | 4327 | ESVIRNYEDHFPLLFSEASE | MAGE-A10 |
| | | | [209-228] | | | | [162-181] |
| 3 | 3005 | HTPHKTLMPYASLFQSHSCK | NYD-TSPG | 2 | 4328 | PDLESEFQAAISRKMVELVH | MAGE-A2 |
| | | | [515-534] | | | | [99-118] |
| 3 | 3006 | LQQLSLLMWITQCFLPVFLA | NY-ESO-1 | 2 | 4329 | VVGNWQYFFPVIFSKASSSL | MAGE-A3 |
| | | | [153-172] | | | | [139-158] |
| 3 | 3007 | CDLHPYPYCLCYSKRSRSCG | ODF1 | 2 | 4330 | VVGNWQYFFPVIFSKASDSL | MAGE-A6 |
| | | | [47-66] | | | | [139-158] |
| 3 | 3008 | RGPIMALYSSPGPKYLIPPT | ODF3 | 2 | 4331 | DGREHSVYWKLRKLLTQEWV | MAGE-A8 |
| | | | [16-35] | | | | [235-254] |
| 3 | 3009 | QCHAVLADSVHLAWDLSRSL | OIP5 | 2 | 4332 | AHAETSYEKVINYLVMLNAR | MAGE-A9 |
| | | | [82-101] | | | | [276-295] |
| 3 | 3010 | QEDRLYLVGNVCILRTQLLQ | PASD1 | 2 | 4333 | TEEEIWKFMNVLGAYDGEEH | MAGE-B1 |
| | | | [163-182] | | | | [216-235] |
| 3 | 3011 | GFTTSILQYENSIMLCTDVS | PIWIL1 | 2 | 4334 | TNKKKVSFSSPLILGATIQK | MAGE-B3 |
| | | | [251-270] | | | | [33-52] |
| 3 | 3012 | CIPFYNVVFRRVMKLLDMKL | PIWIL2 | 2 | 4335 | VAARRGTTAMTSAYSRATSS | MAGE-B4 |
| | | | [319-338] | | | | [321-340] |
| 3 | 3013 | NHVQPHAYQFTYRVTECGIR | PLAC1 | 2 | 4336 | PQILNRTSQHLVVAFGVELK | MAGE-B6 |
| | | | [64-83] | | | | [234-253] |
| 3 | 3014 | LQHLIGLSNLTHVLYPVPLE | PRAME | 2 | 4337 | NPASSFFSSALLSIFQSSPE | MAGE-C1 |
| | | | [427-446] | | | | [130-149] |
| 3 | 3015 | CWTARIRAVGLLTVISKGCS | PSCA | 2 | 4338 | SSASSTLYLVFSPSSFSTSS | MAGE-C2 |
| | | | [39-58] | | | | [40-59] |
| 3 | 3016 | SAGCVFYEIASLQPLFPGVN | RAGE-1 | 2 | 4339 | RSQAGMFIYSNNRLIKMHEK | MORC1 |
| | | | [187-206] | | | | [363-382] |
| 3 | 3017 | MAITQFRLFKFCTCLATVFS | RCAS1 | 2 | 4340 | YEQANLNMANSIKFSVWVSF | MPHOSPH1 |
| | | | [1-20] | | | | [256-275] |
| 3 | 3018 | PNNVLSTVQPVIIYLTATGI | SAGE1 | 2 | 4341 | PQKRSRAAFSHTQVIELERK | NKX3.1 |
| | | | [312-331] | | | | [123-142] |
| 3 | 3019 | CKALMRFIMVTSVISLILLV | SLCO6A1 | 2 | 4342 | GINNVSFSGQSVLLFEVLFY | NLRP4 |
| | | | [451-470] | | | | [673-692] |
| 3 | 3020 | RALELHPFSMKPLLRRAMAY | SPAG1 | 2 | 4343 | KRASQYSGQLKVLIAENTML | NY-BR-1 |
| | | | [512-531] | | | | [1103-1122] |
| 3 | 3021 | SAQKFSLILKILSMIYKLVQ | SPO11 | 2 | 4344 | WTLSRFFSYLRSWDVDDLLL | NYD-TSPG |
| | | | [107-126] | | | | [322-341] |
| 3 | 3022 | TSEKINMISGVLQRYCRFGS | SSX-3 | 2 | 4345 | GDGPYSTFLTSSPIRSRSPP | ODF2 |
| | | | [147-166] | | | | [809-828] |
| 3 | 3023 | MGAPTLPPAWQPFLKDHRIS | Survivin | 2 | 4346 | NDQESSQPVGSVIVQEPTEE | PAGE2 |
| | | | [1-20] | | | | [16-35] |
| 3 | 3024 | DKKTFYKTADISQMLVCTAD | TAF7L | 2 | 4347 | MSARVRSRSRGRGDGQEAPD | PAGE4 |
| | | | [167-186] | | | | [1-20] |
| 3 | 3025 | LSNRLLLRLECNVVIIAHCN | TAG-2a | 2 | 4348 | RGNDQESSQPVGPVIVQQPT | PAGE5 |
| | | | [45-64] | | | | [33-52] |
| 3 | 3026 | ECYQPYYLPGYRYLNSWRPS | TEKT5 | 2 | 4349 | NHPVRFLQAQPIVPVQRAAE | PASD1 |
| | | | [34-53] | | | | [599-618] |
| 3 | 3027 | YWTERFLEDTTLTITVPAVS | THEG | 2 | 4350 | LVGRNFYDPTSAMVLQQHRL | PIWIL2 |
| | | | [172-191] | | | | [338-357] |
| 3 | 3028 | PYRLPALFELYPEFLLVFKE | TMEM31 | 2 | 4351 | TKFKQSRAMNFDFPFKKGSG | RAGE-1 |
| | | | [84-103] | | | | [227-246] |
| 3 | 3029 | DVKVQFFYSNLPTYYDNCSF | TPTE | 2 | 4352 | QLEPDYFKDMTPTIRKTQKI | RCAS1 |
| | | | [475-494] | | | | [89-108] |
| 3 | 3030 | ICAGTIIASQWVLTVAHCLI | TSP50 | 2 | 4353 | KELEELRAAFTRALEYLKQE | SART3 |
| | | | [137-156] | | | | [440-459] |
| 3 | 3031 | LFVWMHYYVSMDALLGGSEI | TYR | 2 | 4354 | NNNIEKMITAFEELRVQAEN | SCP-1 |
| | | | [175-194] | | | | [215-234] |
| 3 | 3032 | GCNKRYFKLSHLQMHSRKHT | WT1 | 2 | 4355 | METQQQEIASVRKSLQSMLF | SCP3a |
| | | | [329-348] | | | | [217-236] |
| 3 | 3033 | VICKSCISQTPGINLDLGSG | XAGE-1c | 2 | 4356 | EISILQEQISHLQFVIHSQH | se57-1 |
| | | | [117-136] | | | | [235-254] |
| 3 | 3034 | QILELLVLEQFLTILPGDLQ | ZNF165 | 2 | 4357 | KEEVAAVKIQAAFRGHIARE | SP17 |
| | | | [87-106] | | | | [113-132] |
| 4 | 3035 | HYRCSNHVYYAKRVLCSQPV | ACRBP | 2 | 4358 | EKDPSLVYQHLLYLSKAERF | SPAG1 |
| | | | [108-127] | | | | [863-882] |
| 4 | 3036 | HVPSVLLADQLQMSLYASGL | ACTL8 | 2 | 4359 | NPLQMEEEEFMEIMVEIPAK | SPAN-Xc |
| | | | [123-142] | | | | [78-97] |
| 4 | 3037 | CAIVTFMNKTLGTFSIAVAH | ADAM29 | 2 | 4360 | EKISYVYMKRNYKAMTKLGF | SSX-1 |
| | | | [313-332] | | | | [44-63] |
| 4 | 3038 | LNEELDFLVTSYEEIIECAD | CAGE1 | 2 | 4361 | EWEKMKASEKIFYVYMKRKY | SSX-2 |
| | | | [697-716] | | | | [36-55] |
| 4 | 3039 | MARALVQLWAICMLRVALAT | CALR3 | 2 | 4362 | EKIVYVYMKRKYEAMTKLGF | SSX-3 |
| | | | [1-20] | | | | [44-63] |
| 4 | 3040 | EVMYPHLMEGFLPFSNLVTH | CDCA1 | 2 | 4363 | VERPQMTFGSLQRIFPKIMP | SSX-4 |
| | | | [72-91] | | | | [94-113] |
| 4 | 3041 | RVYHSLCPISWVESWNEQIK | COX6B2 | 2 | 4364 | EKIIYVYMKRKYEAMTKLGF | SSX-5 |
| | | | [61-80] | | | | [44-63] |
| 4 | 3042 | SSDPTSWSSAIQSWYDEILD | CRISP2 | 2 | 4365 | EPRVEVLINRINEVQQAKKK | SYCE1 |
| | | | [101-120] | | | | [50-69] |
| 4 | 3043 | DSPSYQKRQRMALLARKQGA | CT45 | 2 | 4366 | NLTLKNHFQSVLEQLELQEK | TAF7L |
| | | | [23-42] | | | | [424-443] |
| 4 | 3044 | VKRLLAVSVSCITYLRGIFP | CT46 | 2 | 4367 | WAERIMFSDLRSLQLKKTME | TDRD1 |
| | | | [30-49] | | | | [246-265] |
| 4 | 3045 | VISFVLFLFGGNNFIQNFYL | CTAGE1 | 2 | 4368 | TLQEIFQAENTIMLLERSIM | TEKT5 |
| | | | [12-31] | | | | [363-382] |
| 4 | 3046 | SHPYGFPWELVIRAAVAGFF | CTAGE2 | 2 | 4369 | TLVELQMMMETIQFIENKKR | TEX15 |
| | | | [5-24] | | | | [1689-1708] |
| 4 | 3047 | RPDSNLYGFPWELVICAAVV | cTAGE5 | 2 | 4370 | VTKKVVASPRIISLAKPKVR | THEG |
| | | | [31-50] | | | | [326-345] |
| 4 | 3048 | SPPAPARRHLLVLLLLLSTL | DKKL1 | 2 | 4371 | VIMHSRYRAQRFWSWVGQAN | TSP50 |
| | | | [5-24] | | | | [186-205] |
| 4 | 3049 | SQDSGLVSLSSSSPISNKST | DMRT1 | 2 | 4372 | DEDEDMLSYMVSLEVGEEKH | TSPY1 |
| | | | [329-348] | | | | [175-194] |
| 4 | 3050 | TSAPGAMLASWARIAARAVQ | DPPA2 | 2 | 4373 | VAKKGKAVARGARGKKGAAT | VCX |
| | | | [179-198] | | | | [38-57] |
| 4 | 3051 | ECVCENYKLAVNCFVNNNRQ | EpCAM | 2 | 4374 | KKKNQQLKVGILHLGSRQKK | XAGE-1 |
| | | | [26-45] | | | | [5-24]; |
| | | | | | | | XAGE-1b |
| | | | | | | | [5-24]; |
| | | | | | | | XAGE-1d |
| | | | | | | | [5-24]; |
| | | | | | | | XAGE-1c |
| | | | | | | | [84-103] |
| 4 | 3052 | ESTVCLMSYERRQILHLITM | FAM46D | 2 | 4375 | PRRSLQPPELIGAMLEPTDE | XAGE-2 |
| | | | [308-327] | | | | [13-32] |
| 4 | 3053 | SHYVAQTGILWLLMNNCFLN | GAGE-1 | 2 | 4376 | KSFKSPKLAKHAAVFSGDKT | ZNF165 |
| | | | [113-132] | | | | [324-343] |
| 4 | 3054 | LLKERDITLRHLLTMREDEF | GASZ | 3 | 4377 | IKVKKLLFSKHLPVFTYTDQ | ADAM29 |
| | | | [294-313] | | | | [67-86] |
| 4 | 3055 | SHISPFSHSSHMLTTPTPMH | GATA-3 | 3 | 4378 | SGEKNIFLASFVHEYSRRHP | AFP |
| | | | [405-424] | | | | [344-363] |
| 4 | 3056 | ATWPHSVHRLAQSYLKEPMI | HAGE | 3 | 4379 | SEGIMTYANSVVSDMMVSIM | AKAP-3 |
| | | | [428-447] | | | | [282-301] |
| 4 | 3057 | NVARCWTYETAVALDCEIPN | HDAC2 | 3 | 4380 | DQVNIDYLMNRPQNLRLEMT | AKAP-4 |
| | | | [308-327] | | | | [161-180] |
| 4 | 3058 | NVARCWTYETSLLVEEAISE | HDAC3 | 3 | 4381 | RDKVLIRIMVSRSEVDMLKI | ANXA2 |
| | | | [302-321] | | | | [284-303] |
| 4 | 3059 | RQQSKAHRHRHARGYSRCRS | HOM-TES-85 | 3 | 4382 | QARLMKEESPVVSWRLEPED | BAGE-1 |
| | | | [62-81] | | | | [16-35]; |
| | | | | | | | BAGE-5 |
| | | | | | | | [16-35]; |
| | | | | | | | BAGE-2 |
| | | | | | | | [16-35]; |
| | | | | | | | BAGE-3 |
| | | | | | | | [16-35] |
| 4 | 3060 | APLLLLSLHGVAASLEVSES | IGFS11 | 3 | 4383 | QADIEVMSTVHISSVYNDVP | CABYR |
| | | | [9-28] | | | | [282-301] |
| 4 | 3061 | LAIGCLYTFLISTTFGCTSS | IL13RA2 | 3 | 4384 | SRLEKLLTQVRNLQFMSENE | CAGE1 |
| | | | [6-25] | | | | [507-526] |
| 4 | 3062 | AVHKHALHDGLRQVAGPGAA | KAAG1 | 3 | 4385 | QTTQNGRFYAISARFKPFSN | CALR3 |
| | | | [15-34] | | | | [67-86] |
| 4 | 3063 | HVKKGIFYHRALLFKALADR | KU-CT-1 | 3 | 4386 | TVFGEKSVITLSSIFTKDLV | CCDC62 |
| | | | [789-808] | | | | [385-404] |
| 4 | 3064 | WREEGFPVGLKLAVLGIFII | LEMD1 | 3 | 4387 | GQKYEKIFEMLEGVQGPTAV | CT45 |
| | | | [147-166] | | | | [138-157] |
| 4 | 3065 | PEEVIWEALNMMGLYDGMEH | MAGE-A10 | 3 | 4388 | GNNFIQNFYLPQNYIDQFLL | CTAGE1 |
| | | | [242-261] | | | | [22-41] |
| 4 | 3066 | KIIDLVHLLLRKYRVKGLIT | MAGE-A11 | 3 | 4389 | TERLLKMKDWAAMLGEDITD | cTAGE5 |
| | | | [225-244] | | | | [268-287] |
| 4 | 3067 | PACYEFLWGPRALVETSYVK | MAGE-A12 | 3 | 4390 | SVKRGTMVRAARALLSAVTR | CTNNA2 |
| | | | [266-285] | | | | [117-136] |
| 4 | 3068 | DPIGHLYIFATCLGLSYDGL | MAGE-A3 | 3 | 4391 | RNGVIDYTIFFTLDSVKLPD | CXorf48 |
| | | | [170-189] | | | | [188-207] |
| 4 | 3069 | PACYEFLWGPRALIETSYVK | MAGE-A6 | 3 | 4392 | VKRSLVYYLKNREVALQNET | DCAF12 |
| | | | [266-285]; | | | | [42-61] |
| | | | MAGE-A2 | | | | |
| | | | [266-285] | | | | |
| 4 | 3070 | RVQAAAMLNDGSSAMGRKCS | MAGE-B3 | 3 | 4393 | PGQTLIYYVDEKAPEFSMQG | EpCAM |
| | | | [317-336] | | | | [244-263] |
| 4 | 3071 | KCVRREYKPYFPQILNRTSQ | MAGE-B6 | 3 | 4394 | NRVAYMNPIAMARWRGPTQS | FAM133A |
| | | | [223-242] | | | | [6-25] |
| 4 | 3072 | HSYTTAEEAAGIGILTVILG | MART1 | 3 | 4395 | KNLELKFVSSLRRQFEFSVD | FAM46D |
| | | | [19-38] | | | | [155-174] |
| 4 | 3073 | GKGKICMIVNISQCYLAYDE | MPHOSPH1 | 3 | 4396 | GENQEHLVIAEMMELGSRSR | FATE1 |
| | | | [446-465] | | | | [26-45] |
| 4 | 3074 | WSDNKIFRDRFLYTFYFCCR | NLRP4 | 3 | 4397 | SPQFKKTMSTFHNLVSLNLN | FBXO39 |
| | | | [172-191] | | | | [213-232] |
| 4 | 3075 | RFTPVDFHYVRNRACFFVQD | NXF2 | 3 | 4398 | RPGSRSSNASLEVLSTEPGS | FSIP1 |
| | | | [151-170] | | | | [21-40] |
| 4 | 3076 | ILSVVAKLLSHGAVIEVHNK | NY-BR-1 | 3 | 4399 | DDVALENFFRYFLRLSDDKM | FTHL17 |
| | | | [95-114] | | | | [45-64] |
| 4 | 3077 | AEDWNLYWRTSSFRMTEHNS | NYD-TSPG | 3 | 4400 | EKDHIFSSYTAFGDLEVFLH | GASZ |
| | | | [118-137] | | | | [265-284] |
| 4 | 3078 | AADHRQLQLSISSCLQQLSL | NY-ESO-1 | 3 | 4401 | EQLLQSASMELKFLIIQNAA | Glypican- |
| | | | [139-158] | | | | 3 |
| | | | | | | | [90-109] |
| 4 | 3079 | LGSKKYSYMNICKEFSLPPC | ODF1 | 3 | 4402 | TLIGANASFSIALNFPGSQK | gp100 |
| | | | [161-180] | | | | [76-95] |
| 4 | 3080 | ENGKVTFIFSTLMLFPINIW | ODF4 | 3 | 4403 | ATQRDLIATQRDLIVTQRDL | HOM-TES-85 |
| | | | [148-167] | | | | [261-280] |
| 4 | 3081 | GDGPDVREGIMPTFDLTKVL | PAGE2 | 3 | 4404 | WAIGLSVMDLVGSILKNLRR | LDHC |
| | | | [85-104] | | | | [250-269] |
| 4 | 3082 | NEFPVVFSGLFSSHLCADFA | PASD1 | 3 | 4405 | SEELNIILQGNIILSTEKSK | LEMD1 |
| | | | [139-158] | | | | [67-86] |
| 4 | 3083 | ILTIPMHFWALFYPKRAMDQ | PIWIL2 | 3 | 4406 | RALAETSYVKVLEYVIKVSA | MAGE-A1 |
| | | | [598-617] | | | | [269-288] |
| 4 | 3084 | YVTSVLQYENSITLCADVSH | PIWIL3 | 3 | 4407 | DGMEHLIYGEPRKLLTQDWV | MAGE-A10 |
| | | | [267-286] | | | | [257-276] |
| 4 | 3085 | PAPCQYAHKLTFLVAQSIHK | PIWIL4 | 3 | 4408 | YAGREHFLFGEPKRLLTQNW | MAGE-A11 |
| | | | [820-839] | | | | [344-363] |
| 4 | 3086 | MVTVHPFMLNNDVCVHFHEL | PLAC1 | 3 | 4409 | PDLETSFQVALSRKMAELVH | MAGE-A12 |
| | | | [36-55] | | | | [99-118] |
| 4 | 3087 | EKEEQYIAQFTSQFLSLQCL | PRAME | 3 | 4410 | PQGASSFSTTINYTLWRQSD | MAGE-A2 |
| | | | [279-298] | | | | [65-84] |
| 4 | 3088 | SILNKWWILTAAHCLYSEEL | PRSS55 | 3 | 4411 | ETSYVKVLEHVVRVNARVRI | MAGE-A4 |
| | | | [96-115] | | | | [281-300]; |
| | | | | | | | MAGE-A8 |
| | | | | | | | [283-302] |
| 4 | 3089 | LQPAAAILALLPALGLLLWG | PSCA | 3 | 4412 | EALDEKVAELVRFLLRKYQI | MAGE-A8 |
| | | | [91-110] | | | | [110-129] |
| 4 | 3090 | VDCTPLMYSLVHNLTKELKS | PSMA | 3 | 4413 | NSDPPRYQFLWGPRAYAETT | MAGE-B1 |
| | | | [464-483] | | | | [262-281] |
| 4 | 3091 | ALICELMDMNIYELIRGRRY | RAGE-1 | 3 | 4414 | FPEILKKASEGLSVVFGLEL | MAGE-B2 |
| | | | [79-98] | | | | [149-168] |
| 4 | 3092 | FKFCTCLATVFSFLKRLICR | RCAS1 | 3 | 4415 | YDGKKHFIFGEPRKLITQDL | MAGE-B3 |
| | | | [9-28] | | | | [233-252] |
| 4 | 3093 | GDPSCVIMQNWARIEARLCN | SART3 | 3 | 4416 | SSSVLRDTASSSLAFGIPQE | MAGE-B4 |
| | | | [468-487] | | | | [42-61] |
| 4 | 3094 | LLVFIIFVRCNPVQFAGINE | SLCO6A1 | 3 | 4417 | ADIKKQAEIAHLYIASLPDP | MPHOSPH1 |
| | | | [468-487] | | | | [687-706] |
| 4 | 3095 | NKECAIYTNRALCYLKLCQF | SPAG1 | 3 | 4418 | ASPQETQSAFSIPVSTLSSS | NXF2 |
| | | | [654-673] | | | | [544-563] |
| 4 | 3096 | IRWSHTRIFQVPSEMTEDIM | SPATA19 | 3 | 4419 | HHIHEQIMEYIRKLSKNHQN | NY-BR-1 |
| | | | [117-136] | | | | [195-214] |
| 4 | 3097 | SWENIKFEDSVGLQMVSHCT | SPO11 | 3 | 4420 | STNRSMQNYVQFLKSSYANV | 0DF2 |
| | | | [77-96] | | | | [788-807] |
| 4 | 3098 | AMTKLGFKVTLPPFMCNKQA | SSX-1 | 3 | 4421 | LGQDGRLLSSTLSLSSNRSL | 0DF4 |
| | | | [57-76] | | | | [39-58] |
| 4 | 3099 | AMTKLGFKATLPPFMCNKRA | SSX-2 | 3 | 4422 | QAVPAFQGPDMEAFQQELAL | PAGE2 |
| | | | [57-76] | | | | [58-77] |
| 4 | 3100 | AMTKLGFKATLPPFMRNKRV | SSX-5 | 3 | 4423 | EDPKDRPSAAHIVEALETDV | PBK |
| | | | [57-76] | | | | [303-322] |
| 4 | 3101 | KHSSGCAFLSVKKQFEELTL | Survivin | 3 | 4424 | GWEEAYTFEGARYYINHNER | PEPP2 |
| | | | [79-98] | | | | [61-80] |
| 4 | 3102 | KAEELLAAAAQRHQQLQQKC | SYCE1 | 3 | 4425 | QKSIAGFVASTNAELTKWYS | PIWIL3 |
| | | | [249-268] | | | | [663-682] |
| 4 | 3103 | PASASLFQDTCAGCASLLHG | TAG-2a | 3 | 4426 | YIPDLASRALRIALLYSHSE | PIWIL4 |
| | | | [74-93] | | | | [130-149] |
| 4 | 3104 | WYRASVLAYASEESVLVGYV | TDRD1 | 3 | 4427 | DFKRANMDNDIALLLLASPI | PRSS55 |
| | | | [558-577] | | | | [147-166] |
| 4 | 3105 | LRPPTILPTLRSALFSRYSP | TEKT5 | 3 | 4428 | QSGAAVVHEIVRSFGTLKKE | PSMA |
| | | | [72-91] | | | | [389-408] |
| 4 | 3106 | VEVKGCTAMIGCRLMSGILA | TEX101 | 3 | 4429 | KNPDFKVFRYSTSLEKHKLF | SART3 |
| | | | [180-199] | | | | [785-804] |
| 4 | 3107 | IYSFGFGKAMPWFQFYLTGA | TEX14 | 3 | 4430 | ASLEIELSNLKAELLSVKKQ | SCP-1 |
| | | | [205-224] | | | | [747-766] |
| 4 | 3108 | CGKGYAWISPCKMSLHFCLC | THEG | 3 | 4431 | AKRKRLEMYTKASLKTSNQK | SCP3a |
| | | | [148-167] | | | | [87-106] |
| 4 | 3109 | WPTEWIFNPYRLPALFELYP | TMEM31 | 3 | 4432 | DSEFFLTTASGVSVLPQNRS | SCRN1 |
| | | | [76-95] | | | | [268-287] |
| 4 | 3110 | LFIKHFIIYSIPRYVRDLKI | TPTE | 3 | 4433 | MEDNSALYESTSAHIIEETE | se57-1 |
| | | | [414-433] | | | | [16-35] |
| 4 | 3111 | NGQALALPAPSRTLLLALPL | TSP50 | 3 | 4434 | SEPHIKRPMNAFMVWAKDER | SOX-6 |
| | | | [358-377] | | | | [617-636] |
| 4 | 3112 | LLGAAMVGAVLTALLAGLVS | TYR | 3 | 4435 | SSEEDKEKEEVAAVKIQAAF | SP17 |
| | | | [478-497] | | | | [106-125] |
| 4 | 3113 | EEQCLSAFTVHFSGQFTGTA | WT1 | 3 | 4436 | REEAQKMSSLLPTMWLGAQN | SPAG9 |
| | | | [85-104] | | | | [959-978] |
| 4 | 3114 | WKVICKSCISQTPGINLDLG | XAGE-1 | 3 | 4437 | ESSTILVVRYRRNVKRTSPE | SPAN-Xc |
| | | | [36-55]; | | | | [46-65] |
| | | | XAGE-1b | | | | |
| | | | [36-55] | | | | |
| 4 | 3115 | LHLGSRQKKIRIQLRSQCAT | XAGE-1c | 3 | 4438 | KGVGLPFLPITSSDIDVVES | SPATA19 |
| | | | [95-114] | | | | [14-33] |
| 4 | 3116 | CEGGTDVKGKILPKAEHFKM | XAGE-2 | 3 | 4439 | WKKMKYSEKISYVYMKRNYK | SSX-1 |
| | | | [82-101] | | | | [37-56] |
| 4 | 3117 | SECGKTFRVSSHLIRHFRIH | ZNF165 | 3 | 4440 | EKIFYVYMKRKYEAMTKLGF | SSX-2 |
| | | | [431-450] | | | | [44-63] |
| 5 | 3118 | PTEYERFFALLTPTWKAETT | ACRBP | 3 | 4441 | EWEKMKSSEKIVYVYMKLNY | SSX-4 |
| | | | [40-59] | | | | [36-55] |
| 5 | 3119 | KMLEILFELLHVPSVLLADQ | ACTL8 | 3 | 4442 | EWEKMKASEKIIYVYMKRKY | SSX-5 |
| | | | [113-132] | | | | [36-55] |
| 5 | 3120 | ESLAVILAQLLSLSMGITYD | ADAM2 | 3 | 4443 | KNKQRQLRLAFEEQLEDLMG | SYCE1 |
| | | | [305-324] | | | | [148-167] |
| 5 | 3121 | NITPRMQHDTSHLFTTLGLR | ADAM29 | 3 | 4444 | GADAQYFVYSNESVRPYTPF | TAG-1 |
| | | | [276-295] | | | | [765-784] |
| 5 | 3122 | EPTAFRISVTSSCFVQNTLT | BAGE-2 | 3 | 4445 | GDFYVQLYSSEVLEYMNQLS | TDRD1 |
| | | | [69-88] | | | | [277-296] |
| 5 | 3123 | EPTPFRISVTSSCFVQNTLT | BAGE-3 | 3 | 4446 | LSQFWEFSETTASTVSTTLH | TEX101 |
| | | | [69-88] | | | | [120-139] |
| 5 | 3124 | PSQNQIRNCYQNFLDYHRCL | COX6B2 | 3 | 4447 | KSDIYSFSMIMQEILTDDIP | TEX14 |
| | | | [24-43] | | | | [436-455] |
| 5 | 3125 | MALLPVLFLVTVLLPSLPAE | CRISP2 | 3 | 4448 | LKKSKYFISTYIDFVPYIAS | TEX15 |
| | | | [1-20] | | | | [2172-2191] |
| 5 | 3126 | TQLVKWMLGCYDALQKKYLR | CT46 | 3 | 4449 | DQVDWSRLLRDAGLVKMSRK | TRAG-3 |
| | | | [76-95] | | | | [52-71] |
| 5 | 3127 | MVHSLLHRLSHNDHILIENR | CT47 | 3 | 4450 | MANERISMQNLEALLVANRD | TSGA10 |
| | | | [126-145] | | | | [557-576] |
| 5 | 3128 | LTSFPTFTSVGVLIVLVLCS | CTAGE1 | 3 | 4451 | LVNITEYRASHSTPIEWYPD | TSPY1 |
| | | | [41-60] | | | | [221-240] |
| 5 | 3129 | RYCSAVFHERYALIQHQKTH | CTCFL | 3 | 4452 | AVRRGRRGKKGAATKMAAVT | VCX |
| | | | [461-480] | | | | [44-63] |
| 5 | 3130 | AKNLMNAVVLTVKASYVAST | CTNNA2 | 3 | 4453 | QLKVGILHLGSRQKKIRIQL | XAGE-1d |
| | | | [869-888] | | | | [10-29]; |
| | | | | | | | XAGE-1 |
| | | | | | | | [10-29]; |
| | | | | | | | XAGE-1b |
| | | | | | | | [10-29]; |
| | | | | | | | XAGE-1c |
| | | | | | | | [89-108] |
| 5 | 3131 | VMVESIQFCFIWRAISITPV | CXorf48 | 3 | 4454 | TPDQKREDDQGAAEIQVPDL | XAGE-2 |
| | | | [220-239] | | | | [47-66] |
| 5 | 3132 | MSEVEAAAGATAVPAATVPA | DBPC | 4 | 4455 | EVRAGAFEHLPSLRQLDLSH | 5T4 |
| | | | [1-20] | | | | [132-151] |
| 5 | 3133 | HAMSSQYRMHSYYPPPSYLG | DMRT1 | 4 | 4456 | PHNFRVYSYSGTGIMKPLDQ | ADAM2 |
| | | | [282-301] | | | | [67-86] |
| 5 | 3134 | AVVAGIVVLVISRKKRMAKY | EpCAM | 4 | 4457 | QKLGEYYLQNAFLVAYTKKA | AFP |
| | | | [278-297] | | | | [420-439] |
| 5 | 3135 | AARACFALLWGCALAAAAAA | EPHA2 | 4 | 4458 | DLRSVFFNFIRNLLSETIFK | AKAP-3 |
| | | | [5-24] | | | | [589-608] |
| 5 | 3136 | GSVASYILASHNGISYKDLD | FAM46D | 4 | 4459 | LDSQKMDMSNIVLMLIQKLL | AKAP-4 |
| | | | [65-84] | | | | [619-638] |
| 5 | 3137 | EQGATWRHRETLIIAVLVSA | FATE1 | 4 | 4460 | QNKPLYFADRLYDSMKGKGT | ANXA2 |
| | | | [153-172] | | | | [264-283] |
| 5 | 3138 | SCRKLFYFKIWAFLDVSFVE | FBXO39 | 4 | 4461 | TALDVHFVSTLEPLSNAVKR | BAGE-2 |
| | | | [364-383] | | | | [37-56]; |
| | | | | | | | BAGE-3 |
| | | | | | | | [37-56] |
| 5 | 3139 | LEALLNFFFPTTCNLRENQV | FMR1NB | 4 | 4462 | SEILKEMLAKKHFSYAWPFY | BRDT |
| | | | [122-141] | | | | [277-296] |
| 5 | 3140 | AAINSHITLELYTSYLYLSM | FTHL17 | 4 | 4463 | AYFQELTMYRGNTTMDIKDL | CABYR |
| | | | [19-38] | | | | [39-58] |
| 5 | 3141 | GPVTAQVVLQAAIPLTSCGS | gp100 | 4 | 4464 | NSPTSLLIYKDAPAFNEKAS | CCDC62 |
| | | | [284-303] | | | | [600-619] |
| 5 | 3142 | NVARCWTYETAVALDTEIPN | HDAC1 | 4 | 4465 | EEGNEAANFDLAVVARRYPA | CT47 |
| | | | [307-326] | | | | [97-116] |
| 5 | 3143 | ASGFCYVNDIVIGILELLKY | HDAC3 | 4 | 4466 | SEAVELQDMSLLSIQQQEGV | CTCFL |
| | | | [141-160] | | | | [89-108] |
| 5 | 3144 | KPGIGVLLDTNYNLFYWYEG | IL13RA2 | 4 | 4467 | SSDSSMLDSATSLIQAAKNL | CTNNA2 |
| | | | [158-177] | | | | [853-872] |
| 5 | 3145 | LDLLKSEYPVIQLLALKTLG | KU-CT-1 | 4 | 4468 | SNSIYFSIAIVSEDFVPYKG | CXorf48 |
| | | | [197-216] | | | | [129-148] |
| 5 | 3146 | AQGDGCRGVAFNVMFSAPHI | Lage-1 | 4 | 4469 | PHSIARQKRILVNLSMVENK | CXorf61 |
| | | | [191-210] | | | | [71-90] |
| 5 | 3147 | CTYKIQRLMLKSLTYPERPP | LIPI | 4 | 4470 | DTKEDVFVHQTAIKRNNPRK | DBPC |
| | | | [436-455] | | | | [114-133] |
| 5 | 3148 | GLVCVQAATSSSSPLVLGTL | MAGE-A1 | 4 | 4471 | GSEWSVYAVGSQAHVSFLDP | DCAF12 |
| | | | [24-43] | | | | [305-324] |
| 5 | 3149 | AAISRKMVELVHFLLLKYRA | MAGE-A2 | 4 | 4472 | GIMGQFSHHNIIRLEGVISK | EPHA2 |
| | | | [107-126] | | | | [665-684] |
| 5 | 3150 | KTGLLIIVLGTIAMEGDSAS | MAGE-A4 | 4 | 4473 | RGPTQSVGPTIQDYLNRPRP | FAM133A |
| | | | [199-218] | | | | [20-39] |
| 5 | 3151 | GGASSSISVYYTLWSQFDEG | MAGE-A9 | 4 | 4474 | SAKRVWNMTATRPKKMGSQL | FATE1 |
| | | | [63-82] | | | | [63-82] |
| 5 | 3152 | SWDFPRRKLLMPLLGVIFLN | MAGE-B2 | 4 | 4475 | WRNSIRSSFISSLSFFLKKM | FBXO39 |
| | | | [195-214] | | | | [141-160] |
| 5 | 3153 | PGLYPHLYEDALIDEVERAL | MAGE-B6 | 4 | 4476 | RESLKMRVSKPFGMLMLSIW | FMR1NB |
| | | | [384-403] | | | | [58-77] |
| 5 | 3154 | GIGILTVILGVLLLIGCWYC | MART1 | 4 | 4477 | EEEDTFSSVFHTQIPPEEYE | FSIP1 |
| | | | [29-48] | | | | [191-210] |
| 5 | 3155 | NSYPYYPYLYCVGSWSPAFW | NKX3.1 | 4 | 4478 | LSMAFYFNRDDVALENFFRY | FTHL17 |
| | | | [215-234] | | | | [36-55] |
| 5 | 3156 | AIFYCLFEMQDPAFVKQAVN | NLRP4 | 4 | 4479 | SMELKFLIIQNAAVFQEAFE | Glypican- |
| | | | [552-571] | | | | 3 |
| | | | | | | | [97-116] |
| 5 | 3157 | KDYTCLLSSTWQELILLSSL | NR6A1 | 4 | 4480 | AHSSSAFTITDQVPFSVSVS | gp100 |
| | | | [314-333] | | | | [201-220 |
| 5 | 3158 | IDIILNRRNCMAATLKIIER | NXF2 | 4 | 4481 | GAGKGKYYAVNYPLRDGIDD | HDAC1 |
| | | | [248-267] | | | | [215-234] |
| 5 | 3159 | MYGTSLYQFIPLTFVMPNDY | NYD-TSPG | 4 | 4482 | RGHYERILNPYNLFLSGDSL | JARID1B |
| | | | [169-188] | | | | [172-191] |
| 5 | 3160 | KRELAKLARTTNRILASSCC | ODF1 | 4 | 4483 | QHIKQLSRFAGASIKIAPAE | KOC1 |
| | | | [102-121] | | | | [426-445] |
| 5 | 3161 | SSPGPKYLIPPTTGFMKHTP | ODF3 | 4 | 4484 | AELVRRILSRDAAPLPRPGA | Lage-1 |
| | | | [24-43] | | | | [102-121] |
| 5 | 3162 | THSFRWMAQVLASELSLVAF | ODF4 | 4 | 4485 | NLDSARFRYLIGEKLGVHPT | LDHC |
| | | | [73-92] | | | | [164-183] |
| 5 | 3163 | LRGHFCLSSDKMVCYLLKTK | OIP5 | 4 | 4486 | PDKTMMDGSFSFKLLNQLGM | LIPI |
| | | | [158-177] | | | | [367-386] |
| 5 | 3164 | GNVCILRTQLLQQLYTSKAV | PASD1 | 4 | 4487 | FPEIFGKASESLQLVFGIDV | MAGE-A1 |
| | | | [171-190] | | | | [140-159] |
| 5 | 3165 | LWKKRWFVLSDLCLFYYRDE | PEPP2 | 4 | 4488 | QDFFPVIFSKASEYLQLVFG | MAGE-A2 |
| | | | [186-205] | | | | [144-163] |
| 5 | 3166 | VTGNVTAFDGSILYLPVKLQ | PIWIL2 | 4 | 4489 | NKVDELAHFLLRKYRAKELV | MAGE-A4 |
| | | | [267-286] | | | | [112-131] |
| 5 | 3167 | RELPLLNAMPLHSWLILYSR | PIWIL3 | 4 | 4490 | TTEEQEAVSSSSPLVPGTLG | MAGE-A5 |
| | | | [497-516] | | | | [32-51] |
| 5 | 3168 | DVSYKVLRNETVLEFMTALC | PIWIL4 | 4 | 4491 | EEQKAASSSSTLIMGTLEEV | MAGE-A8 |
| | | | [262-281] | | | | [34-53] |
| 5 | 3169 | GTPSKFVIPVSCAAPQKSPW | PLAC1 | 4 | 4492 | VIKNYKRYFPVIFGKASEFM | MAGE-A9 |
| | | | [104-123] | | | | [138-157] |
| 5 | 3170 | RAVGLLTVISKGCSLNCVDD | PSCA | 4 | 4493 | DNPSGHTYTLVSKLNLTNDG | MAGE-B1 |
| | | | [45-64] | | | | [168-187] |
| 5 | 3171 | PSNALSTVLPGLAYLATADM | SAGE1 | 4 | 4494 | PLTRKSGSLVQFLLYKYKIK | MAGE-B2 |
| | | | [359-378] | | | | [110-129] |
| 5 | 3172 | GNAKYANMWLEYYNLERAHG | SART3 | 4 | 4495 | SLTRKTKMLVQFLLYKYKMK | MAGE-B4 |
| | | | [503-522] | | | | [108-127] |
| 5 | 3173 | VPDKLRSLALGVSYVILRIF | SLCO6A1 | 4 | 4496 | PVSPSFSSTLVSLFQSSPER | MAGE-C1 |
| | | | [607-626] | | | | [271-290] |
| 5 | 3174 | MSIPFSNTHYRIPQGFGNLL | SP17 | 4 | 4497 | VFSPSSFSTSSSLILGGPEE | MAGE-C2 |
| | | | [1-20] | | | | [49-68] |
| 5 | 3175 | IEQVARSISRLTDVSAQDFS | SPATA19 | 4 | 4498 | DDPQKFAMELSIIYKYSPFK | MORC1 |
| | | | [140-159] | | | | [159-178] |
| 5 | 3176 | MCIYKYGSMSMSFEAHHLTV | SPO11 | 4 | 4499 | STEKNAVSMTSSVLSSHSPG | MUC-1 |
| | | | [286-305] | | | | [48-67] |
| 5 | 3177 | EHAWTHRLRERKQLVIYEEI | SSX-2 | 4 | 4500 | VQPTQKQQKHRLFHWQANSE | NA17-A |
| | | | [161-180] | | | | [45-64] |
| 5 | 3178 | HKDLWDFHMPERLAKEICAL | SYCE1 | 4 | 4501 | IWFQNRRYKTKRKQLSSELG | NKX3.1 |
| | | | [169-188] | | | | [170-189] |
| 5 | 3179 | PDEVENQFILRLPLEHACTV | TAF7L | 4 | 4502 | MKAINFLNQDIRGLTSASQL | NR6A1 |
| | | | [95-114] | | | | [392-411] |
| 5 | 3180 | AQDAGVYQCLASNPVGTVVS | TAG-1 | 4 | 4503 | EDSERLMEQQGALLKRLAEA | ODF2 |
| | | | [103-122] | | | | [281-300] |
| 5 | 3181 | CNLEPLVSRDPPASASLFQD | TAG-2a | 4 | 4504 | EKSTKYVFDSAPSHSISART | ODF3 |
| | | | [63-82] | | | | [109-128] |
| 5 | 3182 | TIQANVLEIISPNLFYALPK | TDRD1 | 4 | 4505 | SRVTNNVVLEAPFLVGIEGS | OIP5 |
| | | | [941-960] | | | | [107-126] |
| 5 | 3183 | EEAITIVQHSSPPGLIVTSY | TEX101 | 4 | 4506 | VYQKRLMDEAKILKSLHHPN | PBK |
| | | | [86-105] | | | | [77-96] |
| 5 | 3184 | LLKAGVISAQNIYSFGFGKA | TEX14 | 4 | 4507 | PTPESSTIASYVTLRKTKKM | PEPP2 |
| | | | [194-213] | | | | [856-875] |
| 5 | 3185 | TSSDRTINLLEVLPWPTEWI | TMEM31 | 4 | 4508 | QWALYQYHIDYNPLMEARRL | PIWIL1 |
| | | | [62-81] | | | | [126-145] |
| 5 | 3186 | YDNCSFYFWLHTSFIENNRL | TPTE | 4 | 4509 | RQFVEFTIKEAARFKKVVLI | SAGE1 |
| | | | [489-508] | | | | [860-879] |
| 5 | 3187 | VQELRRQNYSSNAYHMSSTM | TSGA10 | 4 | 4510 | DKKTQTFLLETPEIYWKLDS | SCP-1 |
| | | | [645-664] | | | | [793-812] |
| 5 | 3188 | ECDNFYHNFTKIPTLVQIIK | TSP50 | 4 | 4511 | QNEFKKEMAMLQKKIMMETQ | SCP3a |
| | | | [272-291] | | | | [201-220] |
| 5 | 3189 | ECMTWNQMNLGATLKGVAAG | WT1 | 4 | 4512 | RSIFKPFIFVDDVKLVPKTQ | SCRN1 |
| | | | [234-253] | | | | [302-321] |
| 5 | 3190 | NECGKAFRHSSKLARHQRIH | ZNF165 | 4 | 4513 | LQFVIHSQHQNLRSVIQEME | se57-1 |
| | | | [347-366] | | | | [246-265] |
| 6 | 3191 | LYGGLHMDFWCARLATKGCE | ACABP | 4 | 4514 | GSSLDILSSLNSPALFGDQD | SOX-6 |
| | | | [433-452] | | | | [475-494] |
| 6 | 3192 | VVDSGYGLTRVQPFHQGRPL | ACTL8 | 4 | 4515 | GSKVEDRFYNNHAFEEQEPP | SP17 |
| | | | [147-166] | | | | [61-80] |
| 6 | 3193 | KTSYLVLRPHDVAFLLVYRE | ADAM2 | 4 | 4516 | RDAVKFFVAVPGQVISPQSS | SPAG9 |
| | | | [254-273] | | | | [1223-1242] |
| 6 | 3194 | FTTLGLRGLSGIGAFRGMCT | ADAM29 | 4 | 4517 | TILVVRYRRNVKRTSPEELL | SPAN-Xc |
| | | | [289-308] | | | | [49-68] |
| 6 | 3195 | ISLADLATIFFAQFVQEATY | AFP | 4 | 4518 | EWEKMKVSEKIVYVYMKRKY | SSX-3 |
| | | | [41-60] | | | | [36-55] |
| 6 | 3196 | FLNLVQCIQNKPLYFADRLY | ANXA2 | 4 | 4519 | TFGSLQAIFPKIMPKKPAEE | SSX-4 |
| | | | [256-275] | | | | [100-119] |
| 6 | 3197 | ALQIVYGIRLEHFYMMPVNS | CDCA1 | 4 | 4520 | QRQKDLIMKVENLTLKNHFQ | TAF7L |
| | | | [52-71] | | | | [413-432] |
| 6 | 3198 | KSPNAVVGHYTQLVWYSTYQ | CRISP2 | 4 | 4521 | AEDTALFAPSIKARFPAETY | TAG-1 |
| | | | [128-147] | | | | [231-250] |
| 6 | 3199 | DKTEKVAVDPETVFKRPREC | CT45 | 4 | 4522 | YIEIVMVSETIHFLKNSIAK | TEX15 |
| | | | [3-22] | | | | [2062-2081] |
| 6 | 3200 | NFYLPQNYIDQFLLTSFPTF | CTAGE1 | 4 | 4523 | MWMGLIQLVEGVKRKDQGFL | TAAG-3 |
| | | | [28-47] | | | | [1-20] |
| 6 | 3201 | PQRQDRFYSNCARLSGPAEL | CTAGE2 | 4 | 4524 | LNAEASYKSQISTLHKSVVK | TSGA10 |
| | | | [590-609] | | | | [470-489] |
| 6 | 3202 | AAVVGFFAVLFFLWRSFRSV | cTAGE5 | 4 | 4525 | GEEAVLLLDDIMAEVEVVAE | TSPY1 |
| | | | [47-66] | | | | [60-79] |
| 6 | 3203 | CHLCLKTFRTVTLLRNHVNT | CTCFL | 5 | 4526 | NSLVSLTYVSFRNLTHLESL | 5T4 |
| | | | [287-306] | | | | [244-263] |
| 6 | 3204 | VFWKYRRFQRNTGEMSSNST | CXorf61 | 5 | 4527 | NFGTATFQAITVTKLSQKFT | AFP |
| | | | [17-36] | | | | [229-248] |
| 6 | 3205 | VSRVPVYAHITHKALKDIPK | DCAF12 | 5 | 4528 | SVVSDMMVSIMKTLKIQVKD | AKAP-3 |
| | | | [226-245] | | | | [291-310] |
| 6 | 3206 | CPDCAKRNKKMMKRLMTVEK | DPPA2 | 5 | 4529 | SDLQKYALGFQHALSPSTST | AKAP-4 |
| | | | [279-298] | | | | [116-135] |
| 6 | 3207 | DVWSFGIVMWEVMTYGERPY | EPHA2 | 5 | 4530 | RKYGKSLYYYIQQDTKGDYQ | ANXA2 |
| | | | [799-818] | | | | [309-328] |
| 6 | 3208 | IKNLERYMCSRFFIDFPHIE | FAM46D | 5 | 4531 | LKDLWKHSFSWPFQAPVDAV | BADT |
| | | | [255-274] | | | | [40-59] |
| 6 | 3209 | SMRPTLIDLLPTFRHTLQKL | FBXO39 | 5 | 4532 | DQSDVLMVDVATSMPVVIKE | CABYR |
| | | | [324-343] | | | | [189-208] |
| 6 | 3210 | SSGTTSFKCFAPFRDVPKQM | FMR1NB | 5 | 4533 | KITKQQVFIDVINKLKENVE | CAGE1 |
| | | | [165-184] | | | | [343-362] |
| 6 | 3211 | DPNVACRRLMTPIMYAARDG | GASZ | 5 | 4534 | FSNKGKTLVIQYTVKHEQKM | CALR3 |
| | | | [141-160] | | | | [84-103] |
| 6 | 3212 | ADQPRWVSHHHPAVLNGQHP | GATA-3 | 5 | 4535 | ELHKRTEIIRSLTKKVKALE | CCDC62 |
| | | | [5-24] | | | | [78-97] |
| 6 | 3213 | HSPLKLLTSMAISVVCFFFL | Glypican- | 5 | 4536 | AKRTSRFLSGIINFIHFREA | CDCA1 |
| | | | 3 | | | | [114-133] |
| | | | [559-578] | | | | |
| 6 | 3214 | SSGTLISRALVVTHTYLEPG | gp100 | 5 | 4537 | AGDSLIAGSAMSKAKKLMTG | CT45 |
| | | | [265-284] | | | | [42-61] |
| 6 | 3215 | MSKVMEMFQPSAVVLQCGSD | HDAC1 | 5 | 4538 | PSSETRAFLSPPTLLEGPLR | cTAGE5 |
| | | | [245-264] | | | | [527-546] |
| 6 | 3216 | GVEEAFYTTDRVMTVSFHKY | HDAC2 | 5 | 4539 | DLSRDILNNFPHSIARQKRI | CXorf61 |
| | | | [183-202]; | | | | [61-80] |
| | | | HDAC1 | | | | |
| | | | [182-201] | | | | |
| 6 | 3217 | GVQEAFYLTDRVMTVSFHKY | HDAC3 | 5 | 4540 | EVRLQNETSYSRVLHGYAAQ | DCAF12 |
| | | | [176-195] | | | | [54-73] |
| 6 | 3218 | PPHTHSYTISHATLERIGAV | IGFS11 | 5 | 4541 | GLTGLQSLLQGFSRLFLKGN | DKKL1 |
| | | | [398-417] | | | | [44-63] |
| 6 | 3219 | FQLQNIVKPLPPVYLTFTRE | IL13RA2 | 5 | 4542 | VDDEESVILTLVPVKDDANM | DPPA2 |
| | | | [230-249] | | | | [18-37] |
| 6 | 3220 | SETETVHLFIPALSVGAIIG | KOC1 | 5 | 4543 | KQLENKKTGSKALAEFEEKM | FAM133A |
| | | | [403-422] | | | | [46-65] |
| 6 | 3221 | HEFASLCLANMSAEYTSKVQ | KU-CT-1 | 5 | 4544 | PVFPQLSRSIISKLLNESET | FSIP1 |
| | | | [126-145] | | | | [439-458] |
| 6 | 3222 | GTYPFCTYYFVLSIIVPDKT | LIPI | 5 | 4545 | GWEIGYLDRTSQKLKRLLPI | GASZ |
| | | | [351-370] | | | | [24-43] |
| 6 | 3223 | CILESLFRAVITKKVADLVG | MAGE-A1 | 5 | 4546 | FPKNSSFNPAALSRHMSSLS | GATA-3 |
| | | | [92-111] | | | | [386-405] |
| 6 | 3224 | EKVTDLVQFLLFKYQMKEPI | MAGE-A10 | 5 | 4547 | KHINQLLRTMSMPKGRVLDK | Glypican- |
| | | | [136-155] | | | | 3 |
| | | | | | | | [467-486] |
| 6 | 3225 | EVVEVVRIGHLYILVTCLGL | MAGE-A12 | 5 | 4548 | DRQTVMTSATWPHSVHRLAQ | HAGE |
| | | | [165-184] | | | | [420-439] |
| 6 | 3226 | SRKVAELVHFLLLKYRAREP | MAGE-A3 | 5 | 4549 | GAGKGKYYAVNFPMRDGIDD | HDAC2 |
| | | | [110-129] | | | | [216-235] |
| 6 | 3227 | EFLWGPRALAETSYVKVLEH | MAGE-A4 | 5 | 4550 | PNHPSRKKVNFLDMSLDDII | HOM-TES-85 |
| | | | [271-290]; | | | | [15-34] |
| | | | MAGE-A8 | | | | |
| | | | [273-292] | | | | |
| 6 | 3228 | GLDTQEEALGLVGVQAATTE | MAGE-A5 | 5 | 4551 | SSDNNTLTSSNAYNSRYWSN | IGFS11 |
| | | | [15-34] | | | | [305-324] |
| 6 | 3229 | EALKLKVAELVHFLLHKYRV | MAGE-A9 | 5 | 4552 | TLDDLYPMMNALKLRAESYN | JARID1B |
| | | | [106-125] | | | | [737-756] |
| 6 | 3230 | EVNPTTHSYILVSMLGPNDG | MAGE-B4 | 5 | 4553 | EAQDIKFTEEIPLKILAHNN | KOC1 |
| | | | [68-87] | | | | [267-286] |
| 6 | 3231 | DPDDSYVFVNTLDLTSEGCL | MAGE-C1 | 5 | 4554 | TSGKDYSVSANSRIVIVTAG | LDHC |
| | | | [969-988] | | | | [78-97] |
| 6 | 3232 | EKNCEPVVPNAPPAYEKLSA | MART1 | 5 | 4555 | PSKGRRWAARAPSTRITYGT | LEMD1 |
| | | | [90-109] | | | | [111-130] |
| 6 | 3233 | IELERKFSHQKYLSAPERAH | NKX3.1 | 5 | 4556 | DDTTAMASASSSATGSFSYP | MAGE-A10 |
| | | | [137-156] | | | | [349-368] |
| 6 | 3234 | LIEDGYAVTQAELFALLCRL | NR6A1 | 5 | 4557 | EEQEAAFFSSTLNVGTLEEL | MAGE-A11 |
| | | | [271-290] | | | | [144-163] |
| 6 | 3235 | LKPLVFRVDETTPAVVQSVL | NYD- | 5 | 4558 | DGREDSVFAHPRKLLTQDLV | MAGE-A12 |
| | | | TSPG | | | | [232-251] |
| | | | [84-103] | | | | |
| 6 | 3236 | NILTIRLTAADHRQLQLSIS | NY-ESO-1 | 5 | 4559 | PDLESEFQAALSRKVAELVH | MAGE-A3 |
| | | | [131-150] | | | | [99-118] |
| 6 | 3237 | VDRELRQLRCIDEFSTRCLC | ODF1 | 5 | 4560 | AIPTAIDFTLWRQSIKGSSN | MAGE-A5 |
| | | | [18-37] | | | | [70-89] |
| 6 | 3238 | YDKKIDSLMNAVGCLKSEVK | ODF2 | 5 | 4561 | FPVIFSKASDSLQLVFGIEL | MAGE-A6 |
| | | | [123-142] | | | | [147-166] |
| 6 | 3239 | DSTPGPAAYMLPMVMGPNTV | ODF3 | 5 | 4562 | RTTATTFRARSRAPFSRSSH | MAGE-B1 |
| | | | [134-153] | | | | [326-345] |
| 6 | 3240 | SIPIGWSYFIGWLVLILYFT | ODF4 | 5 | 4563 | TVPSAFQFWYEEALRDEEER | MAGE-33 |
| | | | [176-195] | | | | [298-317] |
| 6 | 3241 | QVTLQLLDGFMITLSTDGVI | PASD1 | 5 | 4564 | NSDPPRYQFLWGPRAHAETS | MAGE-B4 |
| | | | [35-54] | | | | [262-281] |
| 6 | 3242 | PICNDHYRSVYQKRLMDEAK | PBK | 5 | 4565 | ISRYTGYFPVIFRKAREFIE | MAGE-C1 |
| | | | [68-87] | | | | [939-958] |
| 6 | 3243 | PDHIQRLTYKLCHIYYNWPG | PIWIL1 | 5 | 4566 | DSESSFTYTLDEKVAELVEF | MAGE-C2 |
| | | | [805-824] | | | | [132-151] |
| 6 | 3244 | KYTRPTLQMGMSCLLVFKVI | PIWIL3 | 5 | 4567 | STTHSFLFGALAELLDNARD | MORC1 |
| | | | [561-580] | | | | [22-41] |
| 6 | 3245 | LDQLLRHVMNPLETLSITNC | PRAME | 5 | 4568 | SSKKTYSLRSQASIIGVNLA | MPHOSPH1 |
| | | | [313-332] | | | | [1703-1722] |
| 6 | 3246 | NCVDDSQDYYVGKKNITCCD | PSCA | 5 | 4569 | LQRDISEMFLQIYKQGGFLG | MUC-1 |
| | | | [60-79] | | | | [1069-1088] |
| 6 | 3247 | YELVEKFYDPMFKYHLTVAQ | PSMA | 5 | 4570 | HRLFHWQANSERADIPASLR | NA17-A |
| | | | [559-578] | | | | [54-73] |
| 6 | 3248 | SRTDKVLSTAPPQLVHMAAA | SAGE1 | 5 | 4571 | EKNEEIFNYNNHLKNRIYQY | NY-BR-1 |
| | | | [122-141] | | | | [1312-1331] |
| 6 | 3249 | GKKHRYLRLLPEALIRFGGF | SLCO6A1 | 5 | 4572 | AMPFATPMEAELARRSLAQD | NY-ESO-1 |
| | | | [45-64] | | | | [93-112] |
| 6 | 3250 | TTGTGVVYPGAITMATTTPS | SOX-6 | 5 | 4573 | LELEIIVLNDRVTDLVNQQQ | ODF2 |
| | | | [736-755] | | | | [458-477] |
| 6 | 3251 | AEAAGKYSAAIALLEPAGSE | SPAG1 | 5 | 4574 | IILKVALNMARGLKYLHQEK | PBK |
| | | | [462-481] | | | | [142-161] |
| 6 | 3252 | NILDSFTVCNSHVLCIASVP | SPAG9 | 5 | 4575 | VTPAMGMQMRKAIMIEVDDR | PIWIL1 |
| | | | [780-799] | | | | [518-537] |
| 6 | 3253 | RLRERKQLVIYEEISDPEED | SSX-2 | 5 | 4576 | ETFKAVLDGLDVLLAQEVRP | PRAME |
| | | | [167-186] | | | | [95-114] |
| 6 | 3254 | PPAWQPFLKDHRISTFKNWP | Survivin | 5 | 4577 | KNSVKTDLMKAPMVIMDWEE | PRSS55 |
| | | | [7-26] | | | | [202-221] |
| 6 | 3255 | QECKERISALNLQIEEEKNK | SYCE1 | 5 | 4578 | STNEVTRIYNVIGTLRGAVE | PSMA |
| | | | [131-150] | | | | [348-367] |
| 6 | 3256 | REEKCVWKHGITPPLKNVRK | TAF7L | 5 | 4579 | VVRLSSYSSPTLQSVLGSGT | RAGE-1 |
| | | | [212-231] | | | | [357-376] |
| 6 | 3257 | RLLLRLECNVVIIAHCNLEP | TAG-2a | 5 | 4580 | MTPTIRKTQKIVIKKREPLN | RCAS1 |
| | | | [48-67] | | | | [98-117] |
| 6 | 3258 | TSGLELYCQKGLSMTVEADP | TEX101 | 5 | 4581 | HDLEIQLTAITTSEQYYSKE | SCP-1 |
| | | | [21-40] | | | | [479-498] |
| 6 | 3259 | IVHLLLQISDALRYLHFQGF | TEX14 | 5 | 4582 | KILQQSRIVQSQRLKTIKQL | SCP3a |
| | | | [353-372] | | | | [159-178] |
| 6 | 3260 | TISFFLCQMLYNRRKILQLK | TEX15 | 5 | 4583 | RRHELYKAHEWARAIIESDQ | SCRN1 |
| | | | [2250-2269] | | | | [343-362] |
| 6 | 3261 | FYKFFLPTILSLSFFILLVL | TMEM31 | 5 | 4584 | IEETEYVKKIRTTLQKIRTQ | se57-1 |
| | | | [135-154] | | | | [31-50] |
| 6 | 3262 | YIPLEYRSISLAIALFFLMD | TPTE | 5 | 4585 | IGEYKQLMRSRRQEMRQFFT | SOX-6 |
| | | | [121-140] | | | | [707-726] |
| 6 | 3263 | FYHKTNIKMRCEFLACWPAF | TRAG-3 | 5 | 4586 | SMKPLLRRAMAYETLEQYGK | SPAG1 |
| | | | [24-43] | | | | [520-539] |
| 6 | 3264 | TRELCIKLDSSKELLNRQLV | TSGA10 | 5 | 4587 | EDGRVQAFGWSLPQKYKQVT | SPAG9 |
| | | | [511-530] | | | | [639-658] |
| 6 | 3265 | GEPLVCSMEGTWYLVGLVSW | TSP50 | 5 | 4588 | HRLRERKQLVIYEEISDPEE | SSX-1 |
| | | | [311-330] | | | | [166-185] |
| 6 | 3266 | LDRRGAVIQSVPGFWANVIA | TSPY1 | 5 | 4589 | AMTKLGFKAILPSFMRNKRV | SSX-3 |
| | | | [145-164] | | | | [57-76] |
| 6 | 3267 | LCGAQYRIHTHGVFRGIQDV | WT1 | 5 | 4590 | GKHAWTHRLRERKQLVVYEE | SSX-4 |
| | | | [281-300] | | | | [160-179] |
| 6 | 3268 | MRCHAHGPSCLVTAITREEG | XAGE-1c | 5 | 4591 | ATLPPFMRNKRVADFQGNDF | SSX-5 |
| | | | [1-20] | | | | [65-84] |
| 7 | 3269 | YVRNLFLTGNQLAVLPAGAF | 5T4 | 5 | 4592 | TNNKKKEFEETAKKVRRAIE | Survivin |
| | | | [92-111] | | | | [117-136] |
| 7 | 3270 | NPGSLLQLPHTEALLVLCYS | ACRBP | 5 | 4593 | DQMWRQFTDTNLAFNARISE | TEKT5 |
| | | | [312-331] | | | | [329-348] |
| 7 | 3271 | QLQMSLYASGLLTGVVVDSG | ACTL8 | 5 | 4594 | VTELEYNYNQFSTLLKNVMS | TEX15 |
| | | | [132-151] | | | | [2198-2217] |
| 7 | 3272 | DRKVICFVDVSTLNVEDKDY | AKAP-4 | 5 | 4595 | MPMSEVSQVSRAAQMAVPSS | THEG |
| | | | [38-57] | | | | [247-266] |
| 7 | 3273 | EPLSNAVKRNVPRCIIILVL | BAGE-2 | 5 | 4596 | DAGLVKMSRKPRASSPLSNN | TRAG-3 |
| | | | [48-67]; | | | | [62-81] |
| | | | BAGE-3 | | | | |
| | | | [48-67] | | | | |
| 7 | 3274 | ISISSLRQFETVCKFHWVEA | CAGE1 | 5 | 4597 | FWANVIANHPQMSALITDED | TSPY1 |
| | | | [113-132] | | | | [158-177] |
| 7 | 3275 | THLYTLILRPDLSYDVKIDG | CALR3 | 5 | 4598 | ADASQSSMHNALHIYMNGTM | TYR |
| | | | [169-188] | | | | [355-374] |
| 7 | 3276 | SSAIQSWYDEILDFVYGVGP | CRISP2 | 5 | 4599 | WRGRSTYRPRPRRSLQPPEL | XAGE-2 |
| | | | [108-127] | | | | [3-22] |
| 7 | 3277 | HILIENRQLSRLMVGPHAAA | CT47 | 6 | 4600 | FSGSNASVSAPSPLVELILN | 5T4 |
| | | | [139-158] | | | | [162-181] |
| 7 | 3278 | LIVLVLCSAFLLLWQGEGVN | CTAGE1 | 6 | 4601 | NRNVNFAMKSETKLREKMYS | AKAP-3 |
| | | | [53-72] | | | | [417-436] |
| 7 | 3279 | IGCVTSINEDNIYISNSIYF | CXorf48 | 6 | 4602 | SKGLMVYANQVASDMMVSLM | AKAP-4 |
| | | | [115-134] | | | | [330-349] |
| 7 | 3280 | NPNSLAIYRLPTLDPVCVGD | DCAF12 | 6 | 4603 | VGTIDMTLQSDIMTMFENNF | BRDT |
| | | | [161-180] | | | | [927-946] |
| 7 | 3281 | VSVEAFLMQASGVRWCVVHG | DPPA2 | 6 | 4604 | SKPRLVVPYGLKTLLEGISR | CABYR |
| | | | [209-228] | | | | [4-23] |
| 7 | 3282 | NTVICSKLAAKCLVMKAEMN | EpCAM | 6 | 4605 | NNIENYSTNALIQPVDTISI | CAGE1 |
| | | | [55-74] | | | | [96-115] |
| 7 | 3283 | VCRKWNQMMYSAELWRYRTI | FBXO39 | 6 | 4606 | ESGSIEYDWNLTSLKKETSP | CALR3 |
| | | | [42-61] | | | | [192-211] |
| 7 | 3284 | RNRRSHRAMRVAHLELATYE | FMR1NB | 6 | 4607 | DKELNDMVAVHQQQLLSWEE | CCDC62 |
| | | | [11-30] | | | | [41-60] |
| 7 | 3285 | NKHHEIFNLLSFTLNPLEGK | GASZ | 6 | 4608 | VGEVSTPFHIFKVKVTTERE | CT46 |
| | | | [225-244] | | | | [212-231] |
| 7 | 3286 | ACGLYHKMNGQNRPLIKPKR | GATA-3 | 6 | 4609 | LGEEEGEQAAGLAAVPRGGS | CT47 |
| | | | [287-306] | | | | [61-80] |
| 7 | 3287 | VNGMYRIYDMENVLLGLFST | Glypican- | 6 | 4610 | RGSQKKHISPVQALSEFKAM | CTNNA2 |
| | | | 3 | | | | [931-950] |
| | | | [307-326] | | | | |
| 7 | 3288 | LSIGTGRAMLGTHTMEVTVY | gp100 | 6 | 4611 | IDESIYFSSDVVTGNVPLKV | CXorf48 |
| | | | [170-189] | | | | [53-72] |
| 7 | 3289 | TEEEKWSHMQTFLQSMSSTD | HAGE | 6 | 4612 | HQTAIKANNPRKFLRSVGDG | DBPC |
| | | | [469-488] | | | | [122-141] |
| 7 | 3290 | AILELLKYHQRVLYIDIDIH | HDAC1 | 6 | 4613 | SRLSPRKTHLLYILRPSRQL | DKKL1 |
| | | | [159-178]; | | | | [223-242] |
| | | | HDAC2 | | | | |
| | | | [160-179] | | | | |
| 7 | 3291 | ALSSGLYQCVASNAIGTSTC | IGFS11 | 6 | 4614 | QSVPQFFTFEDAPSYPEARA | DMRT1 |
| | | | [207-226] | | | | [302-321] |
| 7 | 3292 | NIPPHLQWEVLDSLLVQYGV | KOC1 | 6 | 4615 | QKEITTRYQLDPKFITSILY | EpCAM |
| | | | [87-106] | | | | [167-186] |
| 7 | 3293 | PCGARRPDSRLLQLHITMPF | Lage-1 | 6 | 4616 | EFNVLEMEVMRRQLYAVNRR | FATE1 |
| | | | [77-96] | | | | [128-147] |
| 7 | 3294 | IPAIVHYSPDCKILVVSNPV | LDHC | 6 | 4617 | KRPSFLDDPLYGISVSLSSE | FSIP1 |
| | | | [121-140] | | | | [533-552] |
| 7 | 3295 | YEKKLVQLLVSPPCAPPVMN | LEMD1 | 6 | 4618 | KNVNQSLLDLYQLAVEKGDP | FTHL17 |
| | | | [34-53] | | | | [109-128] |
| 7 | 3296 | AVITKKVADLVGFLLLKYRA | MAGE-A1 | 6 | 4619 | MSSTDKVIVFVSRKAVADHL | HAGE |
| | | | [100-119] | | | | [484-503] |
| 7 | 3297 | LGSVIRNFQDFFPVIFSKAS | MAGE-A12 | 6 | 4620 | GDLVDTQSDLIATQRDLIAT | HOM-TES-85 |
| | | | [136-155] | | | | [236-255] |
| 7 | 3298 | GIEVVEVVPISHLYILVTCL | MAGE-A2 | 6 | 4621 | PYSAVEKAMARLQELLTVSE | JARID1B |
| | | | [163-182] | | | | [950-969] |
| 7 | 3299 | ASNTYTLVTCLGLSYDGLLG | MAGE-A4 | 6 | 4622 | ITMPFSSPMEAELVRRILSR | Lage-1 |
| | | | [173-192] | | | | [92-111] |
| 7 | 3300 | AGSPGPLKSPQGASAIPTAI | MAGE-A5 | 6 | 4623 | LKGEMMDLQHGSLFFSTSKI | LDHC |
| | | | [56-75] | | | | [58-77] |
| 7 | 3301 | DPIGHVYIFATCLGLSYDGL | MAGE-A6 | 6 | 4624 | LQGNIILSTEKSKKLKKWPE | LEMD1 |
| | | | [170-189] | | | | [74-93] |
| 7 | 3302 | KVINYLVMLNAREPICYPSL | MAGE-A9 | 6 | 4625 | EESFSPTAMDAIFGSLSDEG | MAGE-A11 |
| | | | [284-303] | | | | [177-196] |
| 7 | 3303 | PQRAPTTAAAAAAGVSSTKS | MAGE-32 | 6 | 4626 | PDLESEFQAALSRKVAKLVH | MAGE-A6 |
| | | | [62-81] | | | | [99-118] |
| 7 | 3304 | FLGLLGIYDGILHSIYGDAR | MAGE-B6 | 6 | 4627 | VRVNARVRISYPSLHEEALG | MAGE-A8 |
| | | | [310-329] | | | | [294-313] |
| 7 | 3305 | LKRAREFMELLFGLALIEVG | MAGE-C2 | 6 | 4628 | MHFILRKYKMREPIMKADML | MAGE-3 |
| | | | [182-201] | | | | [116-135] |
| 7 | 3306 | TTAEEAAGIGILTVILGVLL | MART1 | 6 | 4629 | KIVGKRFREHFPEILKKASE | MAGE-B2 |
| | | | [22-41] | | | | [139-158] |
| 7 | 3307 | LRLDFIHANSTTHSFLFGAL | MORC1 | 6 | 4630 | VQFLMEMYKMKKPIMKADML | MAGE-B3 |
| | | | [13-32] | | | | [119-138] |
| 7 | 3308 | SEGCVHILDSQTVVLKEPQC | MPHOSPH1 | 6 | 4631 | DEESVSASQKAIIFKRLSKD | MAGE-B6 |
| | | | [77-96] | | | | [174-193] |
| 7 | 3309 | ELLFRQIAWIKKLPFFCELS | NR6A1 | 6 | 4632 | PRELLTKVWVQGHYLEYREV | MAGE-C2 |
| | | | [293-312] | | | | [270-289] |
| 7 | 3310 | KHLKHMRRMYGTSLYQFIPL | NYD- | 6 | 4633 | EKPLNSFQYQRRQAMGIPFI | MORC1 |
| | | | TSPG | | | | [464-483] |
| | | | [161-180] | | | | |
| 7 | 3311 | LSISSCLQQLSLLMWITQCF | NY-ESO-1 | 6 | 4634 | KFSVWVSFFEIYNEYIYDLF | MPHOSPH1 |
| | | | [147-166] | | | | 268-287] |
| 7 | 3312 | ERENRYDCLGSKKYSYMNIC | ODF1 | 6 | 4635 | NGGSSLSYTNPAVAAASANL | MUC-1 |
| | | | [153-172] | | | | [1236-1255] |
| 7 | 3313 | KHTPTKLRAPAYSFRGAPML | ODF3 | 6 | 4636 | QPERLLFVIDSFEELQGGLN | NLRP4 |
| | | | [40-59] | | | | [222-241] |
| 7 | 3314 | TDGVIICVAENISSLLGHLP | PASD1 | 6 | 4637 | QEMVQAFSAQSGMKLEWSQK | NXF2 |
| | | | [50-69] | | | | [573-592] |
| 7 | 3315 | SEKKKSVLCSTPTINIPASP | PBK | 6 | 4638 | ITKRSEQIVEFLLIKNANAN | NY-BR-1 |
| | | | [14-33] | | | | [124-143] |
| 7 | 3316 | YAASIRRTDGGLFLLADVSH | PIWIL2 | 6 | 4639 | ADSVHLAWDLSRSLGAVVFS | OIP5 |
| | | | [363-382] | | | | [88-107] |
| 7 | 3317 | MKVFKFIGLMILLTSAFSAG | PLAC1 | 6 | 4640 | WQQRQFYNKQSTLPRHSTLS | PEPP2 |
| | | | [1-20] | | | | [506-525] |
| 7 | 3318 | LSLQCLQALYVDSLFFLRGR | PRAME | 6 | 4641 | ESVGLVSMFRGLGIETVSKT | PIWIL2 |
| | | | [293-312] | | | | [67-86] |
| 7 | 3319 | PRSWLLLCPLSHVLFRAILY | PRSS55 | 6 | 4642 | QENPAAFVRAIQQYVDPDVQ | PIWIL4 |
| | | | [333-352] | | | | [526-545] |
| 7 | 3320 | NITCCDTDLCNASGAHALQP | PSCA | 6 | 4643 | KAVSQDMVIYSTEIHYSSKG | PLAC1 |
| | | | [74-93] | | | | [85-104] |
| 7 | 3321 | LSPQCLSLLHAMVAYDPDER | RAGE-1 | 6 | 4644 | DNDIALLLLASPIKLDDLKV | PRSS55 |
| | | | [254-273] | | | | [154-173] |
| 7 | 3322 | AAGISSTITRDLYVTATHSV | SAGE1 | 6 | 4645 | EIQALRRLNPHPNILMLHEV | RAGE-1 |
| | | | [657-676] | | | | [50-69] |
| 7 | 3323 | TREPAAEIEALLGMDLVRLG | SCRN1 | 6 | 4646 | EEEEDAAWQAEEVLRQQKLA | RCAS1 |
| | | | [97-116] | | | | [160-179] |
| 7 | 3324 | IAECTSMIGYALGYVLGAPL | SLCO6A1 | 6 | 4647 | FIQATDYVEIWQAYLDYLRR | SART3 |
| | | | [269-288] | | | | [411-430] |
| 7 | 3325 | EIADDLSILYSNRAACYLKE | SPAG1 | 6 | 4648 | MEESNKARAAHSFVVTEFET | SCP-1 |
| | | | [481-500] | | | | [363-382] |
| 7 | 3326 | GVWVSIRLDSTLRLYHAHTY | SPAG9 | 6 | 4649 | RLKTIKQLYEQFIKSMEELE | SCP3a |
| | | | [1101-1120] | | | | [171-190] |
| 7 | 3327 | INMISGVLQRYCRFGSRPLQ | SSX-3 | 6 | 4650 | GETAKEALDVIVSLLEEHGQ | SCRN1 |
| | | | [151-170] | | | | [120-139] |
| 7 | 3328 | KLNYEVMTKLGFKVTLPPFM | SSX-4 | 6 | 4651 | EAGAAALRNVAQRLFENYQT | se57-1 |
| | | | [52-71] | | | | [121-140] |
| 7 | 3329 | FLEGCACTPERMAEAGFIHC | Survivin | 6 | 4652 | ISGKEEETSVTILDSSEEDK | SP17 |
| | | | [27-46] | | | | [92-111] |
| 7 | 3330 | QSGRKLAELQASLSKYCDQL | TDRD1 | 6 | 4653 | IDVVESEAVSVLHHWLKKTE | SPATA19 |
| | | | [515-534] | | | | [28-47] |
| 7 | 3331 | ILLVLGASLLTSGLELYCQK | TEX101 | 6 | 4654 | QGIRNLVTDAKFVLIVEKDA | SPO11 |
| | | | [11-30] | | | | [208-227] |
| 7 | 3332 | LHFQGFIHASLSSYAVHIIS | TEX14 | 6 | 4655 | EKRSKAFDDIATYFSKKEWK | SSX-1 |
| | | | [367-386] | | | | [19-38] |
| 7 | 3333 | FELYPEFLLVFKEAFHDISH | TMEM31 | 6 | 4656 | GFKAILPSFMRNKRVTDFQG | SSX-3 |
| | | | [91-110] | | | | [62-81] |
| 7 | 3334 | LAIALFFLMDVLLRVFVERR | TPTE | 6 | 4657 | ISEKLRKAFDDIAKYFSKKE | SSX-4 |
| | | | [131-150] | | | | [17-36] |
| 7 | 3335 | LLKEHLCLAENKMAIQSRDV | TSGA10 | 6 | 4658 | HRVRERKQLVIYEEISDPQE | SSX-5 |
| | | | [594-613] | | | | [166-185] |
| 7 | 3336 | FRSNPYFQNKVITKEYLVNI | TSPY1 | 6 | 4659 | QALAPDFALNPVRRLIPAAR | TAG-1 |
| | | | [205-224] | | | | [413-432] |
| 7 | 3337 | EQASRIWSWLLGAAMVGAVL | TYR | 6 | 4660 | IMLLKNFMLNQNVMLSVKGI | TDRD1 |
| | | | [469-488] | | | | [1072-1091] |
| 7 | 3338 | ALPVSGAAQWAPVLDFAPPG | WT1 | 6 | 4661 | DNIKHSQNMRANSIQLREEA | TEKT5 |
| | | | [25-44] | | | | [301-320] |
| 7 | 3339 | EEGGPRSGGAQAKLGCCWGY | XAGE-1c | 6 | 4662 | PKIRDNFWSMPMSEVSQVSR | THEG |
| | | | [18-37] | | | | [238-257] |
| 8 | 3340 | LVPDGAVCSNLPYASWFESF | ACRBP | 6 | 4663 | HNALHIYMNGTMSQVQGSAN | TYR |
| | | | [84-103] | | | | [363-382] |
| 8 | 3341 | YAGGVVLHPRTISLESLAVI | ADAM2 | 6 | 4664 | DLERGTDEAVLQVQAHEHGQ | ZNF165 |
| | | | [291-310] | | | | [126-145] |
| 8 | 3342 | MCTPHRSCAIVTFMNKTLGT | ADAM29 | 7 | 4665 | GLGGLRMDSNFDSLPVQITV | ADAM2 |
| | | | [306-325] | | | | [10-29] |
| 8 | 3343 | DKLVESVMKLCLIMAKYSND | AKAP-4 | 7 | 4666 | EIKPLAFSTTFEHLVYKMDS | ADAM29 |
| | | | [698-717] | | | | [135-154] |
| 8 | 3344 | LEPEDGTALDVHFVSTLEPL | BAGE-2 | 7 | 4667 | ASFVHEYSRRHPQLAVSVIL | AFP |
| | | | [31-50]; | | | | [352-371] |
| | | | BAGE-3 | | | | |
| | | | [31-50] | | | | |
| 8 | 3345 | FAADVRLMFMNCYKYNPPDH | BADT | 7 | 4668 | DDFTASVSEGIMTYANSVVS | AKAP-3 |
| | | | [337-356] | | | | [275-294] |
| 8 | 3346 | SGIINFIHFREACRETYMEF | CDCA1 | 7 | 4669 | SDTSGDFRKLMVALAKGRRA | ANXA2 |
| | | | [122-141] | | | | [161-180] |
| 8 | 3347 | RCGENLYMSSDPTSWSSAIQ | CRISP2 | 7 | 4670 | VDAVKLQLPDYYTIIKNPMD | BRDT |
| | | | [93-112] | | | | [56-75] |
| 8 | 3348 | NESSMLSTDTKKASILLIRK | CT46 | 7 | 4671 | TMYRGNTTMDIKDLVKQFHQ | CABYR |
| | | | [137-156] | | | | [45-64] |
| 8 | 3349 | ANFDLAVVARRYPASGIHFV | CT47 | 7 | 4672 | SRQMVTDLELSTLLPISHEN | CCDC62 |
| | | | [103-122] | | | | [641-660] |
| 8 | 3350 | YIDQFLLTSFPTFTSVGVLI | CTAGE1 | 7 | 4673 | TLSFPRYNVAEIVIHIRNKI | CDCA1 |
| | | | [35-54] | | | | [3-22] |
| 8 | 3351 | FAMRNVYLPRGFLPYRPPRP | CTAGE2 | 7 | 4674 | AMSKAKKLMTGHAIPPSQLD | CT45 |
| | | | [717-736] | | | | [51-70] |
| 8 | 3352 | PKYQCPHCATIIARKSDLRV | CTCFL | 7 | 4675 | DALQKKYLRMVVLAVYTNPE | CT46 |
| | | | [426-445] | | | | [87-106] |
| 8 | 3353 | VVLTVKASYVASTKYQKVYG | CTNNA2 | 7 | 4676 | LTERLLKMKDGVAMLEEDVT | CTAGE2 |
| | | | [876-895] | | | | [237-256] |
| 8 | 3354 | PQVDDIVNVVMVESIQFCFI | CXorf48 | 7 | 4677 | SKSLKSQVAEAKMTFKIFQM | cTAGE5 |
| | | | [211-230] | | | | [180-199] |
| 8 | 3355 | LGTVKWFNVRNGYGFINRND | DBPC | 7 | 4678 | KSDLRVHMRNLHAYSAAELK | CTCFL |
| | | | [95-114] | | | | [440-459] |
| 8 | 3356 | SGIRSVSFYEHIITVGTGQG | DCAF12 | 7 | 4679 | FGKEMVKLNYVAARRQQELK | CTNNA2 |
| | | | [341-360] | | | | [179-198] |
| 8 | 3357 | KNMENRHAMSSQYRMHSYYP | DMRT1 | 7 | 4680 | KRILVNLSMVENKLVELEHT | CXorf61 |
| | | | [276-295] | | | | [78-97] |
| 8 | 3358 | TKGWVRLQFHAGQAWVPTTH | DPPA2 | 7 | 4681 | NRRKSRRFIPRPPSVAPPPM | DBPC |
| | | | [235-254] | | | | [176-195] |
| 8 | 3359 | LAAATATFAAAQEECVCENY | EpCAM | 7 | 4682 | LQGFSRLFLKGNLLAGIDSL | DKKL1 |
| | | | [13-32] | | | | [52-71] |
| 8 | 3360 | VSGLVTSRSFRTASVSINQT | EPHA2 | 7 | 4683 | ASEGRMVIQDIPAVTSRGHV | DMRT1 |
| | | | [418-437] | | | | [178-197] |
| 8 | 3361 | EPPPVSFQPYHPLHFRGSNG | FAM46D | 7 | 4684 | PGHQKRIAYSLLGLKDQVNT | EPHA2 |
| | | | [368-387] | | | | [952-971] |
| 8 | 3362 | GQSLEEDSALEALLNFFFPT | FMR1NB | 7 | 4685 | LDPMLDFYSDKNAKLTKESY | FAM46D |
| | | | [113-132] | | | | [180-199] |
| 8 | 3363 | CILKQKSIIKLSSERKKEDI | FSIP1 | 7 | 4686 | PGTDAVAQTSLEEFNVLEME | FATE |
| | | | [415-434] | | | | [116-135] |
| 8 | 3364 | GWTPLMYAASVANAELVRVL | GASZ | 7 | 4687 | AIQKMKKLDKILAKKQRREK | FSIP1 |
| | | | [79-98] | | | | [118-137] |
| 8 | 3365 | DCVLYRYGSFSVTLDIVQGI | gp100 | 7 | 4688 | HFLESHYLHEQVKTIKELGG | FTHL17 |
| | | | [474-493] | | | | [132-151] |
| 8 | 3366 | HEELPLCFALKSHFVGAVIG | HAGE | 7 | 4689 | EKIKQRLFENLRMLPHAPGV | HDAC2 |
| | | | [65-84] | | | | [361-380]; |
| | | | | | | | HDAC1 |
| | | | | | | | [360-379] |
| 8 | 3367 | GILELLKYHPRVLYIDIDIH | HDAC3 | 7 | 4690 | TIFENLKMLNHAPSVQIHDV | HDAC3 |
| | | | [153-172] | | | | [361-380] |
| 8 | 3368 | VGFTGTMPATNVSIFINNTQ | IGFS11 | 7 | 4691 | PSQKPSGFKSGQHPLNGQPL | HOM-TES-85 |
| | | | [92-111] | | | | [92-111] |
| 8 | 3369 | LPPVYLTFTRESSCEIKLKW | IL13RA2 | 7 | 4692 | GSETWKTIITKNLHYKDGFD | IL13RA2 |
| | | | [239-258] | | | | [77-96] |
| 8 | 3370 | VDILTYIVWKISGLPVTRVI | LDHC | 7 | 4693 | IEEIPAYLPNGAALKDSVQR | JARID1B |
| | | | [140-159] | | | | [997-1016] |
| 8 | 3371 | DHFPLLFSEASECMLLVFGI | MAGE-A10 | 7 | 4694 | DVGYGRSISSSSSLARSSKE | KU-CT-1 |
| | | | [170-189] | | | | [621-640] |
| 8 | 3372 | EYLQLVFGIEVVEVVRIGHL | MAGE-A12 | 7 | 4695 | SRGATTFIYNRAVKNTRKVA | LIPI |
| | | | [156-175] | | | | [135-154] |
| 8 | 3373 | GPRALIETSYVKVLHHTLKI | MAGE-A2 | 7 | 4696 | PRAHAEIRKMSLLKFLAKVN | MAGE-A10 |
| | | | [274-293] | | | | [300-319] |
| 8 | 3374 | SSSSPLVPGTLGEVPAAGSP | MAGE-A5 | 7 | 4697 | VKGLITKAEMLGSVIKNYED | MAGE-A11 |
| | | | [40-59] | | | | [239-258] |
| 8 | 3375 | RALIETSYVKVLHHMVKISG | MAGE-A6 | 7 | 4698 | EEQEAASSSSTLVEVTLGEV | MAGE-A3 |
| | | | [276-295] | | | | [34-53]; |
| | | | | | | | MAGE-A6 |
| | | | | | | | [34-53] |
| 8 | 3376 | AGHSYILVTCLGLSYDGLLG | MAGE-A8 | 7 | 4699 | EERAQVASSVRARRATTATT | MAGE-B1 |
| | | | [175-194] | | | | [312-331] |
| 8 | 3377 | WGPRAYAETTKMKVLEFLAK | MAGE-B1 | 7 | 4700 | IEKKQSFSQGLSSTVQSRTD | MAGE-B3 |
| | | | [272-291] | | | | [90-109] |
| 8 | 3378 | TDEESLLSSWDFPRRKLLMP | MAGE-B2 | 7 | 4701 | FPEIFRKVSQRTELVFGLAL | MAGE-B4 |
| | | | [187-206] | | | | [147-166] |
| 8 | 3379 | SDPPCYEFLWGPRAYAETTK | MAGE-B6 | 7 | 4702 | SLLQIPMTSSFSSTLLSIFQ | MAGE-C1 |
| | | | [350-369] | | | | [336-355] |
| 8 | 3380 | IGILTVILGVLLLIGCWYCR | MART1 | 7 | 4703 | TSPQLSTGVSFFFLSFHISN | MUC-1 |
| | | | [30-49] | | | | [1032-1051] |
| 8 | 3381 | EESLSEVVVPMPSWLIRTRE | MORC1 | 7 | 4704 | TETQVKIWFQNRRYKTKRKQ | NKX3.1 |
| | | | [136-155] | | | | [164-183] |
| 8 | 3382 | NISQCYLAYDETLNVLKFSA | MPHOSPH1 | 7 | 4705 | MQDPAFVKQAVNLLQEANFH | NLRP4 |
| | | | [455-474] | | | | [560-579] |
| 8 | 3383 | SSLRKLCFSVQNVFKKEDEH | NLRP4 | 7 | 4706 | QMEMLKLTMNKRYNVSQQAL | NXF2 |
| | | | [597-616] | | | | [213-232] |
| 8 | 3384 | QDNEWNYTRAGQAFTMLQTE | NXF2 | 7 | 4707 | AQRKSKSLKINLNYAGDALR | NY-BR-1 |
| | | | [595-614] | | | | [1200-1219] |
| 8 | 3385 | HEEVVTFLVDRKCQLDVLDG | NY-BR-1 | 7 | 4708 | ATSAQNIEFLQVIAKREEAI | 0DF2 |
| | | | [29-48] | | | | [675-694] |
| 8 | 3386 | CGARGPESRLLEFYLAMPFA | NY-ESO-1 | 7 | 4709 | PINIWIFELERNVSIPIGWS | ODF4 |
| | | | [78-97] | | | | [163-182] |
| 8 | 3387 | LASSCCSSNILGSVNVCGFE | ODF1 | 7 | 4710 | THNRLKSLMKILSEVTPDQS | OIP5 |
| | | | [116-135] | | | | [206-225] |
| 8 | 3388 | DKMVCYLLKTKAIVNASEMD | OIP5 | 7 | 4711 | SQEIEMHADNPAAIQTVVLQ | PEPP2 |
| | | | [167-186] | | | | [674-693] |
| 8 | 3389 | PEVNPLYRADPVDLEFSVDQ | PASD1 | 7 | 4712 | YNPLMEARRLRSALLFQHED | PIWIL1 |
| | | | [291-310] | | | | [136-155] |
| 8 | 3390 | DKADIFAFGLTLWEMMTLSI | PBK | 7 | 4713 | FGERHIFDGNSLLLSRPLKE | PIWIL3 |
| | | | [226-245] | | | | [170-189] |
| 8 | 3391 | GLKPDHMQRLTFKLCHLYYN | PIWIL4 | 7 | 4714 | SNKAKAFDGAILFLSQKLEE | PIWIL4 |
| | | | [793-812] | | | | [151-170] |
| 8 | 3392 | VTECGIRAKAVSQDMVIYST | PLAC1 | 7 | 4715 | LKKEGWRPRRTILFASWDAE | PSMA |
| | | | [77-96] | | | | [405-424] |
| 8 | 3393 | EVGEFPWQVSIQARSEPFCG | PRSS55 | 7 | 4716 | QQRKKMEKEAQRLMKKEQNK | RCAS1 |
| | | | [75-94] | | | | [188-207] |
| 8 | 3394 | LHEVVFDRKSGSLALICELM | RAGE-1 | 7 | 4717 | EKVHSLFRRQLAIPLYDMEA | SART3 |
| | | | [66-85] | | | | [245-264] |
| 8 | 3395 | VFSFLKRLICRSGRGRKLSG | RCAS1 | 7 | 4718 | EQEQSSLRASLEIELSNLKA | SCP-1 |
| | | | [18-37] | | | | [739-758] |
| 8 | 3396 | SLEKHKLFISGLPFSCTKEE | SART3 | 7 | 4719 | NLLTGAQNEFKKEMAMLQKK | SCP3a |
| | | | [797-816] | | | | [195-214] |
| 8 | 3397 | AEGSKAMNGSAAKLQQYYCW | SOX-6 | 7 | 4720 | ERKLSLENKLLQLKSSATYG | se57-1 |
| | | | [576-595] | | | | [207-226] |
| 8 | 3398 | MTFGRLHRIIPKIMPKKPAE | SSX-1 | 7 | 4721 | SYNHKQIEQLYAAQLASMQV | SOX-6 |
| | | | [99-118] | | | | [360-379] |
| 8 | 3399 | TENEPDLAQCFFCFKELEGW | Survivin | 7 | 4722 | REILREQPDNIPAFAAAYFE | SP17 |
| | | | [48-67] | | | | [25-44] |
| 8 | 3400 | ACTVRNLARSQSVKMKDKLK | TAF7L | 7 | 4723 | HLSKSDLLANQSQEVLEERT | SPATA19 |
| | | | [111-130] | | | | [93-112] |
| 8 | 3401 | SIKARFPAETYALVGQQVTL | TAG-1 | 7 | 4724 | ASIENIIQDIITSLARNEAP | SPO11 |
| | | | [240-259] | | | | [49-68] |
| 8 | 3402 | PLVSRDPPASASLFQDTCAG | TAG-2a | 7 | 4725 | GKHAWTHRLRERKQLVIYEE | SSX-1 |
| | | | [67-86] | | | | [160-179] |
| 8 | 3403 | AVGPMFVREACPHQLLTQPR | TEX101 | 7 | 4726 | QIPEKIQKAFDDIAKYFSKE | SSX-2 |
| | | | [199-218] | | | | [16-35] |
| 8 | 3404 | VGPPSLNYIPPVLQLSGGQK | TEX14 | 7 | 4727 | KYFSEKEWEKMKASEKIIYV | SSX-5 |
| | | | [794-813] | | | | [30-49] |
| 8 | 3405 | KAQMEKIGLPIILHLFALST | TMEM31 | 7 | 4728 | AEGPSTLDEGLFLRSQEAAA | SYCE1 |
| | | | [113-132] | | | | [219-238] |
| 8 | 3406 | YFWLHTSFIENNRLYLPKNE | TPTE | 7 | 4729 | DADSSAQAAAQAPENFQEGK | TAF7L |
| | | | [495-514] | | | | [66-85] |
| 8 | 3407 | EAPPIYLQVSSYQHWIWDCL | TSP50 | 7 | 4730 | VSREAILRFGFLQEFSKEER | TAG-1 |
| | | | [338-357] | | | | [121-140] |
| 8 | 3408 | TLAKHTISSDYVIPIGTYGQ | TYR | 7 | 4731 | GGAESERGLPASTLSRLSNR | TAG-2a |
| | | | [139-158] | | | | [29-48] |
| 8 | 3409 | WAPVLDFAPPGASAYGSLGG | WT1 | 7 | 4732 | GFWKSELSYELDRLLTENQN | TEKT5 |
| | | | [34-53] | | | | [149-168] |
| 8 | 3410 | GGAQAKLGCCWGYPSPRSTW | XAGE-1c | 7 | 4733 | ALKSRISWEGLLALDNGEME | TEX15 |
| | | | [25-44] | | | | [712-731] |
| 8 | 3411 | LKQELCRQLFRQFCYQDSPG | ZNF165 | 7 | 4734 | RPKRFYLEYYNNNRTTPVWP | THEG |
| | | | [43-62] | | | | [199-218] |
| 9 | 3412 | PAGAFARRPPLAELAALNLS | 5T4 | 7 | 4735 | VLGEAWRDQVDWSRLLRDAG | TRAG-3 |
| | | | [107-126] | | | | [45-64] |
| 9 | 3413 | FKSQQCLMANRNRKVSRMRC | ACRBP | 7 | 4736 | SDVPVLQVIMHSRYRAQRFW | TSP50 |
| | | | [490-509] | | | | [179-198] |
| 9 | 3414 | SVESCEISLRPLLVSHVMAC | ACTL8 | 7 | 4737 | FKWNSDFINHQIIYAGEKNH | ZNF165 |
| | | | [279-298] | | | | [301-320] |
| 9 | 3415 | EELQKYIQESQALAKRSCGL | AFP | 8 | 4738 | LRHLDLSNNSLVSLTYVSFR | 5T4 |
| | | | [399-418] | | | | [236-255] |
| 9 | 3416 | AVSPEFAYVPADPAQLAAQM | CABYR | 8 | 4739 | KTLEFAGQDLSAYLLKSLFK | ACTL8 |
| | | | [160-179] | | | | [171-190] |
| 9 | 3417 | ECADQRLAISHSQIAHLEER | CAGE1 | 8 | 4740 | YKEVSKMVKDALTAIEKPTG | AFP |
| | | | [713-732] | | | | [60-79] |
| 9 | 3418 | REKLKSQEIFLNLKTALEKY | CDCA1 | 8 | 4741 | LMTDTQFVSAVKRTVFSHGS | AKAP-3 |
| | | | [414-433] | | | | [348-367] |
| 9 | 3419 | QLVWYSTYQVGCGIAYCPNQ | CRISP2 | 8 | 4742 | PKWISIMTERSVPHLQKVFD | ANXA2 |
| | | | [139-158] | | | | [211-230] |
| 9 | 3420 | KRKLVKELRCVGQKYEKIFE | CT45 | 8 | 4743 | EVPAQLLDAEGAIKIGSEKS | CABYR |
| | | | [127-146] | | | | [397-416] |
| 9 | 3421 | NKISTEHQSLVLVKRLLAVS | CT46 | 8 | 4744 | EKVSDIMLQKLKSLHLKKKT | CAGE1 |
| | | | [18-37] | | | | [645-664] |
| 9 | 3422 | YLPRGFLPYRPPRPAFFPPA | CTAGE2 | 8 | 4745 | DSRFGHFRLSSGKFYGHKEK | CALR3 |
| | | | [723-742] | | | | [43-62] |
| 9 | 3423 | LPQGDTQLTTVQGVVTSFCG | CXorf48 | 8 | 4746 | VEWMSIFKPSKMQRIVRLKS | CCDC62 |
| | | | [29-48] | | | | [532-551] |
| 9 | 3424 | PPARSQADKPVLAIQVLGTV | DBPC | 8 | 4747 | SQIDDFTGFSKDRMMQKPGS | CT45 |
| | | | [79-98] | | | | [71-90] |
| 9 | 3425 | AENTLSKLLSTKLPYCRENV | DCAF12 | 8 | 4748 | LLEKDPYALDVPNTAFGREH | cTAGE5 |
| | | | [281-300] | | | | [497-516] |
| 9 | 3426 | PYYNNLYNCPQYSMALAADS | DMRT1 | 8 | 4749 | NSTALALVRPSSSGLINSNT | CXorf61 |
| | | | [220-239] | | | | [34-53] |
| 9 | 3427 | KALNSCSIPVSVEAFLMQAS | DPPA2 | 8 | 4750 | PRMEEKEALVPIQKATDSFH | DKKL1 |
| | | | [200-219] | | | | [141-160] |
| 9 | 3428 | ALLSVRVYYKKCPELLQGLA | EPHA2 | 8 | 4751 | TRPKKMGSQLPKPRMLRESG | FATE1 |
| | | | [190-209] | | | | [73-92] |
| 9 | 3429 | CQILDSLSYMRNENVISELN | FBXO39 | 8 | 4752 | MGKRLDYLNLKGARLTVEQG | FBXO39 |
| | | | [180-199] | | | | [160-179] |
| 9 | 3430 | CYYLSYYLCSGSSYFVLANG | FMR1NB | 8 | 4753 | LSDDKMEHAQKLMRLQNLRG | FTHL17 |
| | | | [83-102] | | | | [59-78] |
| 9 | 3431 | KYDTNCDAAINSHITLELYT | FTHL17 | 8 | 4754 | KLESSHSRGSMTALGGASSS | GATA-3 |
| | | | [12-31] | | | | [195-214] |
| 9 | 3432 | NGYTALTWAARQGHKNIVLK | GASZ | 8 | 4755 | YYPEDLFIDKKVLKVAHVEH | Glypican- |
| | | | [181-200] | | | | 3 |
| | | | | | | | [361-380] |
| 9 | 3433 | HVPPYYGNSVRATVQRYPPT | GATA-3 | 8 | 4756 | NHHSERSRNHLERSLSQSDR | HOM-TES-85 |
| | | | [59-78] | | | | [156-175] |
| 9 | 3434 | RCLLHLAVIGALLAVGATKV | gp100 | 8 | 4757 | EGDALRYMIERTVNWQHRAQ | JARID1B |
| | | | [7-26]] | | | | [1248-1267] |
| 9 | 3435 | KCVEVVKTFNLPLLMLGGGG | HDAC2 | 8 | 4758 | LDKLNGFQLENFTLKVAYIP | KOC1 |
| | | | [284-303] | | | | [136-155] |
| 9 | 3436 | INQVVDFYQPTCIVLQCGAD | HDAC3 | 8 | 4759 | LLRELDVMNSVIAQLAPEEE | KU-CT-1 |
| | | | [240-259] | | | | [103-122] |
| 9 | 3437 | SKKTLLRFWLPFGFILILVI | IL13RA2 | 8 | 4760 | REGAGRMRVVGWGLGSASPE | Lage-1 |
| | | | [337-356] | | | | [142-161] |
| 9 | 3438 | DLLHQLVTIMNPNTLMTHEV | JARID1B | 8 | 4761 | LSTEKSKKLKKWPEASTTKR | LEMD1 |
| | | | [547-566] | | | | [80-99] |
| 9 | 3439 | EAHIRVPSFAAGRVIGKGGK | KOC1 | 8 | 4762 | GSIPLWLQNFVRILLNEEDM | LIPI |
| | | | [489-508] | | | | [108-127] |
| 9 | 3440 | IIKLKGYTSWAIGLSVMDLV | LDHC | 8 | 4763 | QSPQGASAFPTTINFTRQRQ | MAGE-A1 |
| | | | [241-260] | | | | [56-75] |
| 9 | 3441 | TTKRKAVDTYCLDYKPSKGR | LEMD1 | 8 | 4764 | GSVIKNYEDYFPEIFREASV | MAGE-A11 |
| | | | [96-115] | | | | [250-269] |
| 9 | 3442 | FIKCNHQRAVHLFMASLETN | LIPI | 8 | 4765 | KLLTQHFVQENYLEYRQVPG | MAGE-A3 |
| | | | [269-288] | | | | [244-263] |
| 9 | 3443 | EEALEAQQEALGLVCVQAAT | MAGE-A1 | 8 | 4766 | TTEEQEAAVSSSSPLVPGTL | MAGE-A4 |
| | | | [13-32] | | | | [32-51] |
| 9 | 3444 | GPITQIFPTVRPADLTRVIM | MAGE-A11 | 8 | 4767 | VGKEHMFYGEPRKLLTQDWV | MAGE-A9 |
| | | | [92-111] | | | | [231-250] |
| 9 | 3445 | ALVETSYVKVLHHLLKISGG | MAGE-A12 | 8 | 4768 | FWAKVNKTVPSAFQFWYEEA | MAGE-B3 |
| | | | [277-296] | | | | [291-310] |
| 9 | 3446 | EYLQLVFGIEVVEVVPISHL | MAGE-A2 | 8 | 4769 | EPTTKAEMLKIISKKYKEHF | MAGE-B4 |
| | | | [156-175] | | | | [128-147] |
| 9 | 3447 | LERVIKNYKRCFPVIFGKAS | MAGE-A4 | 8 | 4770 | IESEPLFTYTLDEKVDELAR | MAGE-C1 |
| | | | [137-156] | | | | [898-917] |
| 9 | 3448 | APEEVIWEALSVMGVYVGKE | MAGE-A9 | 8 | 4771 | KKKVLEFLAKLNNTVPSSFP | MAGE-C2 |
| | | | [215-234] | | | | [311-330] |
| 9 | 3449 | PITKAEMLTNVISRYTGYFP | MAGE-C1 | 8 | 4772 | AASRYNLTISDVSVSDVPFP | MUC-1 |
| | | | [928-947] | | | | [1128-1147] |
| 9 | 3450 | MPREDAHFIYGYPKKGHGHS | MART1 | 8 | 4773 | PTPSKPLTSFLIQDILRDGA | NKX3.1 |
| | | | [1-20] | | | | [20-39] |
| 9 | 3451 | IEDSEMSRVIRVSELSLCDL | MPHOSPH1 | 8 | 4774 | SSRSVELNGFMAFREQYMGM | NR6A1 |
| | | | [362-381] | | | | [198-217] |
| 9 | 3452 | CFPKLLRLDGRELSAPVIVD | NXF2 | 8 | 4775 | SNLQNNYAHLTNSSINKSGA | NYD-TSPG |
| | | | [349-368] | | | | [288-307] |
| 9 | 3453 | SEIVGMLLQQNVDVFAADIC | NY-BR-1 | 8 | 4776 | KLVEAEMDGAAAAKQVMALK | ODF2 |
| | | | [162-181] | | | | [210-229] |
| 9 | 3454 | CIDEFSTRCLCDLYMHPYCC | ODF1 | 8 | 4777 | SAPSHSISARTKAFRVDSTP | ODF3 |
| | | | [27-46] | | | | [118-137] |
| 9 | 3455 | IWIFELERNVSIPIGWSYFI | ODF4 | 8 | 4778 | AFSKKWLDLSRSLFYQRWPV | ODF4 |
| | | | [166-185] | | | | [99-118] |
| 9 | 3456 | ERCAVFQCAQCHAVLADSVH | OIP5 | 8 | 4779 | DLNLEWISLPRSWTYGITRG | PEPP2 |
| | | | [73-92] | | | | [4-23] |
| 9 | 3457 | AVYVEPAAAAAAAAISDDQI | PASD1 | 8 | 4780 | NSLIQNLFKVTPAMGMQMRK | PIWIL1 |
| | | | [223-242] | | | | [509-528] |
| 9 | 3458 | DFDDEAYYAALGTRPPINME | PBK | 8 | 4781 | KWYSRVVFQMPHQEIVDSLK | PIWIL2 |
| | | | [265-284] | | | | [770-789] |
| 9 | 3459 | KKAIQLYRHGTSLEIWLGYV | PIWIL3 | 8 | 4782 | LHSWLILYSRSSHREAMSLK | PIWIL3 |
| | | | [249-268] | | | | [507-526] |
| 9 | 3460 | TRNEWYDFYLISQVACRGTV | PIWIL4 | 8 | 4783 | QLTTLSFYGNSISISALQSL | PRAME |
| | | | [761-780] | | | | [407-426] |
| 9 | 3461 | LLTSAFSAGSGQSPMTVLCS | PLAC1 | 8 | 4784 | EMKTYSVSFDSLFSAVKNFT | PSMA |
| | | | [12-31] | | | | [621-640] |
| 9 | 3462 | LLKDEALAIAALELLPRELF | PRAME | 8 | 4785 | PAPDNVLLTLRPRRINMTDT | SAGE1 |
| | | | [34-53] | | | | [216-235] |
| 9 | 3463 | ECGDRSIFEGRTRYSRITGG | PR5555 | 8 | 4786 | KDKRDYLWTSAKNTLSTPLP | SCP-1 |
| | | | [52-71] | | | | [833-852] |
| 9 | 3464 | YPANEYAYRRGIAEAVGLPS | PSMA | 8 | 4787 | QEEKILNMFRQQQKILQQSR | SCP3a |
| | | | [272-291] | | | | [146-165] |
| 9 | 3465 | QPYTEYISTRWYRAPECLLT | RAGE-1 | 8 | 4788 | DQEQGRKLRSTMLELEKQGL | SCRN1 |
| | | | [156-175] | | | | [361-380] |
| 9 | 3466 | PPQLVHMAAAGIPSMSTRDL | SAGE1 | 8 | 4789 | KKIRTTLQKIRTQMFKDEIR | se57-1 |
| | | | [132-151] | | | | [38-57] |
| 9 | 3467 | RRKVLSRAVAAATYKTMGPA | SART3 | 8 | 4790 | QSSGISFQSKYLSFFILGQT | SLCO6A1 |
| | | | [35-54] | | | | [218-237] |
| 9 | 3468 | AAPPSYCFVAFPPRAKDGLV | SCRN1 | 8 | 4791 | TPNNHFTLEDIQALKRQYEL | SPAG1 |
| | | | [3-22] | | | | [907-926] |
| 9 | 3469 | LCTIIFTTIAFFIYKRRLNE | SLCO6A1 | 8 | 4792 | GYRNKIYVVQPKAMKIEKSF | SPAG9 |
| | | | [678-697] | | | | [1063-1082] |
| 9 | 3470 | YAAQLASMQVSPGAKMPSTP | SOX-6 | 8 | 4793 | EMTEDIMRDRIEQVRRSISR | SPATA19 |
| | | | [370-389] | | | | [130-149] |
| 9 | 3471 | CEKHLQALAPESRALRKDKP | SPAG1 | 8 | 4794 | YATKRDIYYTDSQLFGNQTV | SPO11 |
| | | | [61-80] | | | | [130-149] |
| 9 | 3472 | TFIPYCSMAHAQLCFHGHRD | SPAG9 | 8 | 4795 | MNGDDAFARRPTVGAQIPEK | SSX-2 |
| | | | [1205-1224] | | | | [1-20] |
| 9 | 3473 | PPGKPTTSEKINMISGVLQR | SSX-3 | 8 | 4796 | MNGDDTFARRPTVGAQIPEK | SSX-3 |
| | | | [141-160] | | | | [1-20] |
| 9 | 3474 | FHMPERLAKEICALDSSKEQ | SYCE1 | 8 | 4797 | VTLPPFMRSKRAADFHGNDF | SSX-4 |
| | | | [175-194] | | | | [65-84] |
| 9 | 3475 | TLPLCRVQPITSSHLALPFQ | TDAD1 | 8 | 4798 | RGKHAWTHRVRERKQLVIYE | SSX-5 |
| | | | [1032-1051] | | | | [159-178] |
| 9 | 3476 | SSPPGLIVTSYSNYCEDSFC | TEX101 | 8 | 4799 | VHLKEILSKKQETLRILRLH | SYCE1 |
| | | | [95-114] | | | | [96-115] |
| 9 | 3477 | CKMSLHFCLCWPSVYWTERF | THEG | 8 | 4800 | LGVTKEIAIWAERIMFSDLR | TDAD1 |
| | | | [158-177] | | | | [237-256] |
| 9 | 3478 | FLLVFKEAFHDISHCLKAQM | TMEM31 | 8 | 4801 | LVNEVFTIDDTLQTLKLRLR | TEKT5 |
| | | | [97-116] | | | | [415-434] |
| 9 | 3479 | DRTGTMVCAFLIASEICSTA | TPTE | 8 | 4802 | YGLEHIFFDAAKNLVWKERT | TEX15 |
| | | | [343-362] | | | | [1882-1901] |
| 9 | 3480 | HCLIWRDVIYSVRVGSPWID | TSP50 | 8 | 4803 | PSTTMTKARKRRRRRRLMEL | THEG |
| | | | [153-172] | | | | [112-131] |
| 9 | 3481 | DSCTGSQALLLRTPYSSDNL | WT1 | 8 | 4804 | KARQSEADNNTLKLELITAE | TSGA10 |
| | | | [207-226] | | | | [430-449] |
| 10 | 3482 | LASNHFLYLPRDVLAQLPSL | 5T4 | 8 | 4805 | HHNSSLNFFNWFSDHNFAGS | TSPY1 |
| | | | [217-236] | | | | [250-269] |
| 10 | 3483 | RKPAAGFLPSLLKVLLLPLA | ACRBP | 9 | 4806 | QDFAKYIEMHVIVEKQLYNH | ADAM2 |
| | | | [2-21] | | | | [174-193] |
| 10 | 3484 | ENPGPSYARRRVSLGIDICH | ACTL8 | 9 | 4807 | DSEEKQFSTMRSGFMQNEIT | ADAM29 |
| | | | [40-59] | | | | [153-172] |
| 10 | 3485 | LTNAIFVSFNITIILSSLEL | ADAM2 | 9 | 4808 | KQLQAVLQWVAASELNVPIL | AKAP-3 |
| | | | [211-230] | | | | [771-790] |
| 10 | 3486 | ILQINDFAYEIKPLAFSTTF | ADAM29 | 9 | 4809 | MTDSDFVSAVKRNLFNQWKQ | AKAP-4 |
| | | | [126-145] | | | | [398-417] |
| 10 | 3487 | ENCYSVYADQVNIDYLMNRP | AKAP-4 | 9 | 4810 | RYKSYSPYDMLESIRKEVKG | ANXA2 |
| | | | [153-172] | | | | [231-250] |
| 10 | 3488 | VSNLSQGVMLSHSPICMETT | CAGE1 | 9 | 4811 | LKAVHQQLQVLSQVPFRKLN | BADT |
| | | | [38-57] | | | | [430-449] |
| 10 | 3489 | AIGLELWQVRSGTIFDNFLI | CALA3 | 9 | 4812 | AISARFKPFSNKGKTLVIQY | CALA3 |
| | | | [299-318] | | | | [76-95] |
| 10 | 3490 | TKKASILLIRKIYILMQNLG | CT46 | 9 | 4813 | LHNLRQIYVKQQSDLQFLNF | CCDC62 |
| | | | [146-165] | | | | [282-301] |
| 10 | 3491 | QLSRLMVGPHAAARNLWGNL | CT47 | 9 | 4814 | EEGEQAAGLAAVPRGGSAEE | CT47 |
| | | | [146-165] | | | | [64-83] |
| 10 | 3492 | ELYQENEMKLYRKLIVEEKC | CTAGE2 | 9 | 4815 | LSGPAELRSFNMPSLDKMDG | cTAGE5 |
| | | | [357-376] | | | | [634-653] |
| 10 | 3493 | PPPAPFAMRNVYPPRGFPPY | cTAGE5 | 9 | 4816 | MSGDERSDEIVLTVSNSNVE | CTCFL |
| | | | [743-762] | | | | [206-225] |
| 10 | 3494 | ACKQDLLAYLQRIALYCHQL | CTNNA2 | 9 | 4817 | LVYDGVRDIRKAVLMIRTPE | CTNNA2 |
| | | | [770-789] | | | | [615-634] |
| 10 | 3495 | GPSDSGTRVLIGCVTSINED | CXorf48 | 9 | 4818 | LEHTLLSKGFRGASPHRKST | CXorf61 |
| | | | [105-124] | | | | [94-113] |
| 10 | 3496 | SGQRPRRWCPPPFFYRRRFV | DBPC | 9 | 4819 | VAFWIIKLPRRRSHQDALEG | DKKL1 |
| | | | [216-235] | | | | [167-186] |
| 10 | 3497 | DSSGTKLFVAGGPLPSGLHG | DCAF12 | 9 | 4820 | KTQNDVDIADVAYYFEKDVK | EpCAM |
| | | | [427-446] | | | | [202-221] |
| 10 | 3498 | YPPPSYLGQSVPQFFTFEDA | DMRT1 | 9 | 4821 | IVKDARLNGSVASYILASHN | FAM46D |
| | | | [294-313] | | | | [57-76] |
| 10 | 3499 | LASWARIAARAVQPKALNSC | DPPA2 | 9 | 4822 | LQEYAGNFQGIRFHYDRNPG | FATE1 |
| | | | [186-205] | | | | [98-117] |
| 10 | 3500 | EKAPEFSMQGLKAGVIAVIV | EpCAM | 9 | 4823 | EMENTKKFLSLTAVSEETVG | FSIP1 |
| | | | [254-273] | | | | [168-187] |
| 10 | 3501 | SCKETFNLYYAESDLDYGTN | EPHA2 | 9 | 4824 | VLLGLFSTIHDSIQYVQKNA | Glypican- |
| | | | [114-133] | | | | 3 |
| | | | | | | | [319-338] |
| 10 | 3502 | LRHKCCFSSSGTTSFKCFAP | FMR1NB | 9 | 4825 | PKASTWVVASRRSSTVSRAP | HAGE |
| | | | [157-176] | | | | [8-27] |
| 10 | 3503 | AQKLMRLQNLRGGHICLHDI | FTHL17 | 9 | 4826 | NQPEQVILYQGGQMFDGAPR | IGFS11 |
| | | | [67-86] | | | | [68-87] |
| 10 | 3504 | TTYPPYVPEYSSGLFPPSSL | GATA-3 | 9 | 4827 | KKNSYHFSAGFGSPIEDKSE | KU-CT-1 |
| | | | [220-239] | | | | [643-662] |
| 10 | 3505 | DDMVNELFDSLFPVIYTQLM | Glypican- | 9 | 4828 | VLKDFTVSGNLLFMSVRDQD | Lage-1 |
| | | | 3 | | | | [122-141] |
| | | | [164-183] | | | | |
| 10 | 3506 | CLNVSLADTNSLAVVSTQLI | gp100 | 9 | 4829 | KLLTQDWVQENYLEYRQVPG | MAGE-A10 |
| | | | [566-585] | | | | [269-288]; |
| | | | | | | | MAGE-A4 |
| | | | | | | | [245-264] |
| 10 | 3507 | KYHSDDYIKFLRSIRPDNMS | HDAC1 | 9 | 4830 | APEEKIWEELSVLEVFEGRE | MAGE-A3 |
| | | | [66-85] | | | | [216-235]; |
| | | | | | | | MAGE-A6 |
| | | | | | | | [216-235] |
| 10 | 3508 | SYKHLFQPVINQVVDFYQPT | HDAC3 | 9 | 4831 | KSPQGASAIPTAIDFTLWRQ | MAGE-A5 |
| | | | [231-250] | | | | [63-82] |
| 10 | 3509 | ISHATLERIGAVPVMVPAQS | IGFS11 | 9 | 4832 | LRKLLTQEWVQENYLEYRQA | MAGE-A8 |
| | | | [406-425] | | | | [245-264] |
| 10 | 3510 | PQDFEIVDPGYLGYLYLQWQ | IL13RA2 | 9 | 4833 | DHFTEILNGASRRLELVFGL | MAGE-B1 |
| | | | [35-54] | | | | [144-163] |
| 10 | 3511 | MNPNTLMTHEVPVYRTNQCA | JARID1B | 9 | 4834 | KASEGLSVVFGLELNKVNPN | MAGE-B2 |
| | | | [556-575] | | | | [155-174] |
| 10 | 3512 | MYVIDLMFHPGGLMKLRSRE | KU-CT-1 | 9 | 4835 | ILKKASFNMEVVFGVDLKKV | MAGE-B3 |
| | | | [846-865] | | | | [152-171] |
| 10 | 3513 | ISSIGLTYFQSSNLQCSTCT | LIPI | 9 | 4836 | DTTPNNFPLLYEEALRDEEE | MAGE-B4 |
| | | | [418-437] | | | | [294-313] |
| 10 | 3514 | TGHSYVLVTCLGLSYDGLLG | MAGE-A1 | 9 | 4837 | DSSGESYTLVSKLGLPSEGI | MAGE-B6 |
| | | | [165-184] | | | | [256-275] |
| 10 | 3515 | AQDRIATTDDTTAMASASSS | MAGE-A10 | 9 | 4838 | MIVIKYKDYFPVILKRAREF | MAGE-C2 |
| | | | [341-360] | | | | [169-188] |
| 10 | 3516 | EVLSIMGVYAGREHFLFGEP | MAGE-A11 | 9 | 4839 | EKQRELKTARTLSLFYGVNV | MORC1 |
| | | | [336-355] | | | | [341-360] |
| 10 | 3517 | MAELVHFLLLKYRAREPFTK | MAGE-A12 | 9 | 4840 | TDYYQELQRDISEMFLQIYK | MUC-1 |
| | | | [113-132] | | | | [1063-1082] |
| 10 | 3518 | SVLRNCQDFFPVIFSKASEY | MAGE-A2 | 9 | 4841 | AETEPERHLGSYLLDSENTS | NKX3.1 |
| | | | [138-157] | | | | [91-110] |
| 10 | 3519 | ALVETSYVKVLHHMVKISGG | MAGE-A3 | 9 | 4842 | RNKSVRYLDLSANVLKDEGL | NLRP4 |
| | | | [277-296] | | | | [805-824] |
| 10 | 3520 | SGGPRISYPLLHEWALREGE | MAGE-A6 | 9 | 4843 | RSLDPQSYSLIHQLLSAEDL | NR6A1 |
| | | | [294-313] | | | | [244-263] |
| 10 | 3521 | MLGDGHSMPKAALLIIVLGV | MAGE-A9 | 9 | 4844 | PNDYTKFVAEYFQERQMLGT | NYD-TSPG |
| | | | [188-207] | | | | [185-204] |
| 10 | 3522 | RNGLLMPLLGVIFLKGNSAT | MAGE-B1 | 9 | 4845 | EAELARRSLAQDAPPLPVPG | NY-ESO-1 |
| | | | [197-216] | | | | [101-120] |
| 10 | 3523 | SVTKGEMLKIVGKRFREHFP | MAGE-B2 | 9 | 4846 | SMQNYVQFLKSSYANVFGDG | ODF2 |
| | | | [131-150] | | | | [792-811] |
| 10 | 3524 | FLNMLGIYDGKRHLIFGEPR | MAGE-B4 | 9 | 4847 | DVRVTKFKAPQYTMAARVEP | ODF3 |
| | | | [223-242] | | | | [189-208] |
| 10 | 3525 | IITEDLVQDKYVVYRQVCNS | MAGE-B6 | 9 | 4848 | LHKEKYTLEQALLSASQEIE | PEPP2 |
| | | | [331-350] | | | | [659-678] |
| 10 | 3526 | PVTEAEMLMIVIKYKDYFPV | MAGE-C2 | 9 | 4849 | IYTRRNYEAANSLIQNLFKV | PIWIL1 |
| | | | [161-180] | | | | [499-518] |
| 10 | 3527 | KLKMCFNQIQNTYMVQYEKK | MORC1 | 9 | 4850 | LVGNIVITRYNNRTYRIDDV | PIWIL2 |
| | | | [861-880] | | | | [413-432] |
| 10 | 3528 | SDVPFPFSAQSGAGVPGWGI | MUC-1 | 9 | 4851 | IRKTQKIVIKKREPLNFGIP | RCAS1 |
| | | | [1142-1161] | | | | [102-121] |
| 10 | 3529 | PLCSTFSDQSAYVSAIRDCF | NXF2 | 9 | 4852 | GAIRKMREDRWAVIAKMDRK | SCP-1 |
| | | | [331-350] | | | | [946-965] |
| 10 | 3530 | VLVKRKLVHDIIDLIYLNGL | NYD-TSPG | 9 | 4853 | LQKKIMMETQQQEIASVRKS | SCP3a |
| | | | [401-420] | | | | [211-230] |
| 10 | 3531 | SLLMWITQCFLPVFLAQPPS | NY-ESO-1 | 9 | 4854 | EKEKRTLLERKLSLENKLLQ | se57-1 |
| | | | [157-176] | | | | [199-218] |
| 10 | 3532 | PYPYCLCYSKRSRSCGLCDL | ODF1 | 9 | 4855 | EVLEERTRIQFIRWSHTRIF | SPATA19 |
| | | | [51-70] | | | | [106-125] |
| 10 | 3533 | VVTFGIKHSDYMTPLLVDVE | ODF3 | 9 | 4856 | PTGGSRLASSSEVLASIENI | SPO11 |
| | | | [235-254] | | | | [35-54] |
| 10 | 3534 | FTCAILCYFNHKSFWSLILS | ODF4 | 9 | 4857 | AFDDIATYFSKKEWKKMKYS | SSX-1 |
| | | | [194-213] | | | | [24-43] |
| 10 | 3535 | VVLEAPFLVGIEGSLKGSTY | OIP5 | 9 | 4858 | WEKMKASEKIFYVYMKRKYE | SSX-2 |
| | | | [113-132] | | | | [37-56] |
| 10 | 3536 | EELDESYQKVIELFSVCTNE | PBK | 9 | 4859 | WEKMKSSEKIVYVYMKLNYE | SSX-4 |
| | | | [284-303] | | | | [37-56] |
| 10 | 3537 | TDGGLFLLADVSHKVIRNDC | PIWIL2 | 9 | 4860 | NGDDAFVRRPRVGSQIPEKM | SSX-5 |
| | | | [370-389] | | | | [2-21] |
| 10 | 3538 | WPGFAISVSYFERKLLFSAD | PIWIL4 | 9 | 4861 | NEGTSSIVMEIQKQIEKKEK | TAF7L |
| | | | [243-262] | | | | [384-403] |
| 10 | 3539 | NNDVCVHFHELHLGLGCPPN | PLAC1 | 9 | 4862 | AAVALVSSSAWSSALGSQTT | TAG-1 |
| | | | [45-64] | | | | [15-34] |
| 10 | 3540 | SPYLGQMINLRRLLLSHIHA | PRAME | 9 | 4863 | IMLLERSIMAKEGPLKVAQT | TEKT5 |
| | | | [253-272] | | | | [374-393] |
| 10 | 3541 | GEVKRQIYVAAFTVQAAAET | PSMA | 9 | 4864 | KDRTMNLQDIRYILKNDLKD | TEX14 |
| | | | [726-745] | | | | [497-516] |
| 10 | 3542 | DMNIYELIRGRRYPLSEKKI | RAGE-1 | 9 | 4865 | KDLRRHKIYGRKRRLTSQDS | TEX15 |
| | | | [86-105] | | | | [933-952] |
| 10 | 3543 | PTPDNVLSAVTPELINLAGA | SAGE1 | 9 | 4866 | SEIELLRSQMANERISMQNL | TSGA10 |
| | | | [404-423] | | | | [548-567] |
| 10 | 3544 | VECTYISIDQVPRTYAIMIS | SCRN1 | 9 | 4867 | ESEQAALGEEAVLLLDDIMA | TSPY1 |
| | | | [52-71] | | | | [53-72] |
| 10 | 3545 | LCAALWILMKNPVLICLALS | SLCO6A1 | 9 | 4868 | DSFQDYIKSYLEQASRIWSW | TYR |
| | | | [372-391] | | | | [458-477] |
| 10 | 3546 | DQRTLAAAAAAQQGFLFPPG | SOX-6 | 9 | 4869 | KIESQRIISGRISGYISEAS | ZNF165 |
| | | | [275-294] | | | | [201-220] |
| 10 | 3547 | IFYVYMKRKYEAMTKLGFKA | SSX-2 | 10 | 4870 | KLSQKFTKVNFTEIQKLVLD | AFP |
| | | | [46-65] | | | | [242-261] |
| 10 | 3548 | DLPCVIESLRTLDKKTFYKT | TAF7L | 10 | 4871 | DAMLRKLYNVMFAKKVPEHV | AKAP-3 |
| | | | [155-174] | | | | [375-394 |
| 10 | 3549 | VTLECFAFGNPVPRIKWRKV | TAG-1 | 10 | 4872 | EVDMLKIRSEFKRKYGKSLY | ANXA2 |
| | | | [257-276] | | | | [297-316] |
| 10 | 3550 | LVMTKCRLEHELAIKANTLC | TEKT5 | 10 | 4873 | PSRQTAIIVNPPPPEYINTK | BRDT |
| | | | [443-462] | | | | [4-23] |
| 10 | 3551 | MGTPRIQHLLILLVLGASLL | TEX101 | 10 | 4874 | PAQLAAQMLGKVSSIHSDQS | CABYR |
| | | | [1-20] | | | | [172-191] |
| 10 | 3552 | PKPHVSDHNALLHLARPKAQ | THEG | 10 | 4875 | TSKLQRLLAESRQMVTDLEL | CCDC62 |
| | | | [290-309] | | | | [631-650] |
| 10 | 3553 | VFKEAFHDISHCLKAQMEKI | TMEM31 | 10 | 4876 | LKTEENSFKRLMIVKKEKLA | CDCA1 |
| | | | [100-119] | | | | [334-353] |
| 10 | 3554 | QYFSDLFNILDTAIIVILLL | TPTE | 10 | 4877 | SPPASNMLKMEWSREVTTNA | CRISP2 |
| | | | [152-171] | | | | [52-71] |
| 10 | 3555 | HREKFCYELTGEPLVCSMEG | TSP50 | 10 | 4878 | ALLARKQGAGDSLIAGSAMS | CT45 |
| | | | [301-320] | | | | [34-53] |
| 10 | 3556 | PEKDKFFAYLTLAKHTISSD | TYR | 10 | 4879 | TLQTVHFTSEAVELQDMSLL | CTCFL |
| | | | [129-148] | | | | [81-100] |
| 10 | 3557 | PYSSDNLYQMTSQLECMTWN | WT1 | 10 | 4880 | TDNNLAVYDLSRDILNNFPH | CXorf61 |
| | | | [220-239] | | | | [53-72] |
| 10 | 3558 | EIHTKEQILELLVLEQFLTI | ZNF165 | 10 | 4881 | LEGGHWLSEKRHRLQAIRDG | DKKL1 |
| | | | [81-100] | | | | [184-203] |
| 11 | 3559 | VLCSQPVSILSPNTLKEIEA | ACRBP | 10 | 4882 | SVDSFQIVLDPMLDFYSDKN | FAM46D |
| | | | [121-140] | | | | [172-191] |
| 11 | 3560 | GSNRNFSVWLGASVVAHLST | ACTL8 | 10 | 4883 | PNTKAEMEMSLAEELNHGRQ | FATE1 |
| | | | [330-349] | | | | [6-25] |
| 11 | 3561 | HHCHCNYLWDPPNCLIKGYG | ADAM29 | 10 | 4884 | FERIMKYERLARILLQEIPI | FBXO39 |
| | | | [640-659] | | | | [289-308] |
| 11 | 3562 | DEKQWHDVSVYLGLTNCPSS | CCDC62 | 10 | 4885 | PVKGYELAVTQHQQLAEIDI | FSIP1 |
| | | | [457-476] | | | | [306-325] |
| 11 | 3563 | SADKMQQLNAAHQEALMKLE | CDCA1 | 10 | 4886 | MAASALRGLPVAGGGESSES | GASZ |
| | | | [148-167] | | | | [1-20] |
| 11 | 3564 | ARCMRRDFVKHLKKKLKRMI | CT45 | 10 | 4887 | RNRPGMLVLTPTRELALQVE | HAGE |
| | | | [170-189] | | | | [314-333] |
| 11 | 3565 | CAYGTRYLDDLCVKILREDK | CT46 | 10 | 4888 | EMTKYHSDEYIKFLRSIRPD | HDAC2 |
| | | | [51-70] | | | | [64-83] |
| 11 | 3566 | GAGAAARAGEGLGLIQEAAS | CT47 | 10 | 4889 | QVNTDSETAVVNVTYSSKDQ | KOC1 |
| | | | [175-194] | | | | [112-131] |
| 11 | 3567 | CEKLNRFNSELVHEILCLEK | CTAGE2 | 10 | 4890 | SILKNLRRVHPVSTMVKGLY | LDHC |
| | | | [101-120] | | | | [262-281] |
| 11 | 3568 | LEERLESIISGAALMADSSC | CTNNA2 | 10 | 4891 | LGFSPGPILPSTRKLYEKKL | LEMD1 |
| | | | [303-322] | | | | [19-38] |
| 11 | 3569 | ESIQFCFIWRAISITPVHKS | CXorf48 | 10 | 4892 | GSDPVRYEFLWGPRALAETS | MAGE-A8 |
| | | | [223-242] | | | | [266-285] |
| 11 | 3570 | RPPSVAPPPMVAEIPSAGTG | DBPC | 10 | 4893 | EPRKLITQDLVKLKYLEYRQ | MAGE-B3 |
| | | | [186-205] | | | | [243-262] |
| 11 | 3571 | KATDSFHTELHPRVAFWIIK | DKKL1 | 10 | 4894 | PVSSSFSYTLLSLFQSSPER | MAGE-C1 |
| | | | [154-173] | | | | [446-465] |
| 11 | 3572 | SSFYQPSLFPYYNNLYNCPQ | DMRT1 | 10 | 4895 | NAPPAYEKLSAEQSPPPYSP | MART1 |
| | | | [211-230] | | | | [99-118] |
| 11 | 3573 | QKARCKIPALPLPTILPPIN | DPPA2 | 10 | 4896 | RAKRKLYTSEISSPIDISGQ | MPHOSPH1 |
| | | | [74-93] | | | | [1775-1794] |
| 11 | 3574 | IVVVVIAVVAGIVVLVISRK | EpCAM | 10 | 4897 | AFSHTQVIELERKFSHQKYL | NKX3.1 |
| | | | [272-291] | | | | [130-149] |
| 11 | 3575 | QDIGACVALLSVRVYYKKCP | EPHA2 | 10 | 4898 | FKDPKRAMEAFNLVRESEQL | NLRP4 |
| | | | [183-202] | | | | [315-334] |
| 11 | 3576 | SYERRQILHLITMMALKVLG | FAM46D | 10 | 4899 | STWQELILLSSLTVYSKQIF | NR6A1 |
| | | | [315-334] | | | | [322-341] |
| 11 | 3577 | VSKPFGMLMLSIWILLFVCY | FMR1NB | 10 | 4900 | PKKPSAFKPAIEMQNSVPNK | NY-BR-1 |
| | | | [65-84] | | | | [461-480] |
| 11 | 3578 | QVKTIKELGGYVSNLRKICS | FTHL17 | 10 | 4901 | KNYEGMIDNYKSQVMKTRLE | ODF2 |
| | | | [142-161] | | | | [537-556] |
| 11 | 3579 | CGHLITAVQNVITELPVNSQ | GASZ | 10 | 4902 | SIPQFPITSDSTISTLETPQ | PASD1 |
| | | | [367-386] | | | | [668-687] |
| 11 | 3580 | QDEKECLKYQVPLPDSMKLE | GATA-3 | 10 | 4903 | RSVPAGLTLQSVSPQSLQGK | PEPP2 |
| | | | [178-197] | | | | [595-614] |
| 11 | 3581 | GSLGPLLDGTATLRLVKRQV | gp100 | 10 | 4904 | RRSIAGFVASINEGMTRWFS | PIWIL1 |
| | | | [452-471] | | | | [641-660] |
| 11 | 3582 | GDVGNYYYGQGHPMKPHRIR | HDAC1 | 10 | 4905 | GSEGTVVQLLANHFRVISRP | PIWIL3 |
| | | | [17-36] | | | | [119-138] |
| 11 | 3583 | GDIGNYYYGQGHPMKPHRIR | HDAC2 | 10 | 4906 | FEGRTRYSRITGGMEAEVGE | PRSS55 |
| | | | [18-37] | | | | [59-78] |
| 11 | 3584 | PDVGNFHYGAGHPMKPHRLA | HDAC3 | 10 | 4907 | APRLAEYQAYIDFEMKIGDP | SART3 |
| | | | [11-30] | | | | [307-326] |
| 11 | 3585 | MTSQRSPLAPLLLLSLHGVA | IGFS11 | 10 | 4908 | ESKQLNVYEIKVNKLELELE | SCP-1 |
| | | | [1-20] | | | | [632-651] |
| 11 | 3586 | TNYNLFYWYEGLDHALQCVD | IL13RA2 | 10 | 4909 | GEVQNMLEGVGVDINKALLA | SCP3a |
| | | | [167-186] | | | | [68-87] |
| 11 | 3587 | DAFKSDYFNMPVHMVPTELV | JARID1B | 10 | 4910 | YESTSAHIIEETEYVKKIRT | se57-1 |
| | | | [387-406] | | | | [23-42] |
| 11 | 3588 | SVPLWSGVNVAGVALKTLDP | LDHC | 10 | 4911 | IAKPNNAYEFGQIINALSTR | SPAG1 |
| | | | [197-216] | | | | [800-819] |
| 11 | 3589 | LLGDNQIMPKTGFLIIVLVM | MAGE-A1 | 10 | 4912 | STAHSRIRKERPISLGIFPL | SPAG9 |
| | | | [182-201] | | | | [190-209] |
| 11 | 3590 | GILILILSIIFIEGYCTPEE | MAGE-A10 | 10 | 4913 | QDIHVTRDVVKHHLSKSDLL | SPATA19 |
| | | | [225-244] | | | | [81-100] |
| 11 | 3591 | HPRKLLMQDLVQENYLEYRQ | MAGE-A2 | 10 | 4914 | DVLDRHRESLLAALRAGGRE | SPO11 |
| | | | [241-260] | | | | [14-33] |
| 11 | 3592 | VFGIELMEVDPIGHLYIFAT | MAGE-A3 | 10 | 4915 | DNDHNRRIQVEHPQMTFGRL | SSX-1 |
| | | | [161-180] | | | | [85-104] |
| 11 | 3593 | LLGNNQIFPKTGLLIIVLGT | MAGE-A4 | 10 | 4916 | FGRLQGIFPKIMPKKPAEEG | SSX-3 |
| | | | [190-209] | | | | [101-120] |
| 11 | 3594 | FGIELMEVDPIGHVYIFATC | MAGE-A6 | 10 | 4917 | HRLRERKQLVVYEEISDPEE | SSX-4 |
| | | | [162-181] | | | | [166-185] |
| 11 | 3595 | RYFPVIFGKASEFMQVIFGT | MAGE-A9 | 10 | 4918 | QIPEKMQKAFDDIAKYFSEK | SSX-5 |
| | | | [144-163] | | | | [16-35] |
| 11 | 3596 | KSGLLMSLLVVIFMNGNCAT | MAGE-B6 | 10 | 4919 | KIEDLMEMVQKLQKVGSLEP | SYCE1 |
| | | | [284-303] | | | | [32-51] |
| 11 | 3597 | LQGEEFQSSLQSPVSICSSS | MAGE-C1 | 10 | 4920 | TADELRMISSTFLNLPFQGI | TDRD1 |
| | | | [616-635] | | | | [807-826] |
| 11 | 3598 | KHLCYCLYRPRKYLYVTSSF | MORC1 | 10 | 4921 | RITIGTLFSVLHERRSQFPV | TEX14 |
| | | | [262-281] | | | | [328-347] |
| 11 | 3599 | LVLVCVLVALAIVYLIALAV | MUC-1 | 10 | 4922 | FRQPIFSQYASHQPLPQATY | TEX15 |
| | | | [1164-1183] | | | | [2742-2761] |
| 11 | 3600 | EVLAGLLTNNKKLTYLNVSC | NLRP4 | 10 | 4923 | RRQLDETNDELAQIARERDI | TSGA10 |
| | | | [741-760] | | | | [330-349] |
| 11 | 3601 | DMYIVQKYISNPLLIGRYKC | NYD-TSPG | 10 | 4924 | TPESAPEELLAVQVELEPVN | TSPY1 |
| | | | [235-254] | | | | [104-123] |
| 11 | 3602 | DHRQLQLSISSCLQQLSLLM | NY-ESO-1 | 11 | 4925 | AYPEKMRNRVLLELNSADLD | 5T4 |
| | | | [141-160] | | | | [324-343] |
| 11 | 3603 | DPCNPCYPCGSRFSCRKMIL | ODF1 | 11 | 4926 | DVAFLLVYREKSNYVGATFQ | ADAM2 |
| | | | [231-250] | | | | [264-283] |
| 11 | 3604 | VMKTRLEADEVAAQLERCDK | ODF2 | 11 | 4927 | LQTMKQEFLINLVKQKPQIT | AFP |
| | | | [550-569] | | | | [545-564] |
| 11 | 3605 | CSPGPRYNVNPKILRTGKDL | ODF3 | 11 | 4928 | YDSDSWAEDLIVSALLLIQY | AKAP-3 |
| | | | [64-83] | | | | [518-537] |
| 11 | 3606 | TSAHVMSMGLLHFYKSRSCS | ODF4 | 11 | 4929 | KEFADSISKGLMVYANQVAS | AKAP-4 |
| | | | [126-145] | | | | [323-342] |
| 11 | 3607 | QGQRGHTSMKAVYVEPAAAA | PASD1 | 11 | 4930 | AQRQDIAFAYQRRTKKELAS | ANXA2 |
| | | | [213-232] | | | | [66-85] |
| 11 | 3608 | VSHKVIRNDCVLDVMHAIYQ | PIWIL2 | 11 | 4931 | YNPPDHEVVTMARMLQDVFE | BRDT |
| | | | [380-399] | | | | [351-370] |
| 11 | 3609 | DTVQRLTYCLCHMYYNLPGI | PIWIL3 | 11 | 4932 | EYSDKTTQFPSVYAVPGTEQ | CABYR |
| | | | [827-846] | | | | [114-133] |
| 11 | 3610 | SAGSGQSPMTVLCSIDWFMV | PLAC1 | 11 | 4933 | KEAQEQEFLSLQEEFQKLEK | CAGE1 |
| | | | [18-37] | | | | [477-496] |
| 11 | 3611 | LLFSVLLLLSLVTGTQLGPR | PRSS55 | 11 | 4934 | TQYDLSEFENIGAIGLELWQ | CALR3 |
| | | | [2-21] | | | | [287-306] |
| 11 | 3612 | STAPPWLRHMAAAGISSTIT | SAGE1 | 11 | 4935 | NKHNELRKAVSPPASNMLKM | CRISP2 |
| | | | [646-665] | | | | [42-61] |
| 11 | 3613 | PAEVGDLFYDCVDTEIKFFK | SCRN1 | 11 | 4936 | SVRSRLYVGREKKLALMLSG | cTAGE5 |
| | | | [395-414] | | | | [65-84] |
| 11 | 3614 | PIYLENQFILTPTVATTLAG | SLCO6A1 | 11 | 4937 | DSKLAVSLAETTGLIKLEEE | CTCFL |
| | | | [407-426] | | | | [166-185] |
| 11 | 3615 | GDNYPVQFIPSTMAAAAASG | SOX-6 | 11 | 4938 | SGLINSNTDNNLAVYDLSRD | CXorf61 |
| | | | [300-319] | | | | [46-65] |
| 11 | 3616 | AQNGCLYVHSSVAQWRKCLH | SPAG9 | 11 | 4939 | HKDWIFSIAWISDTMAVSGS | DCAF12 |
| | | | [976-995] | | | | [183-202] |
| 11 | 3617 | NDISCMLKVSRRSLHILSTS | SPO11 | 11 | 4940 | LVIAEMMELGSRSRGASQKK | FATE1 |
| | | | [155-174] | | | | [32-51] |
| 11 | 3618 | ISYVYMKRNYKAMTKLGFKV | SSX-1 | 11 | 4941 | EDYFSHHLAVYNSPQFKKTM | FBXO39 |
| | | | [46-65] | | | | [201-220] |
| 11 | 3619 | VMTKLGFKVTLPPFMRSKRA | SSX-4 | 11 | 4942 | STEPGSFKVDTASNLNSGKE | FSIP1 |
| | | | [57-76] | | | | [35-54] |
| 11 | 3620 | IIYVYMKRKYEAMTKLGFKA | SSX-5 | 11 | 4943 | KMEEKYQLTARLNMEQLLQS | Glypican- |
| | | | [46-65] | | | | 3 |
| | | | | | | | [76-95] |
| 11 | 3621 | EILSKKQETLRILRLHCQEK | SYCE1 | 11 | 4944 | IPEELVSMAERFKAHQQKRE | HAGE |
| | | | [100-119] | | | | [613-632] |
| 11 | 3622 | ISNPGLFTSLGPPLRSTTCH | TDRD1 | 11 | 4945 | QDTDTKITISPLQELTLYNP | KOC1 |
| | | | [152-171] | | | | [304-323] |
| 11 | 3623 | LIIKAGTETAILATKGCIPE | TEX101 | 11 | 4946 | AAYNKLLNNNLSLKYSQTGY | KU-CT-1 |
| | | | [65-84] | | | | [542-561] |
| 11 | 3624 | ATSREFTNAYKLPLAVGPPS | TEX14 | 11 | 4947 | LDGAQDSDDSEELNIILQGN | LEMD |
| | | | [779-798] | | | | [58-77] |
| 11 | 3625 | QRFRGMLWFDLSLLPELVQC | TEX15 | 11 | 4948 | DGSFSFKLLNQLGMIEEPRL | LIPI |
| | | | [2086-2105] | | | | [373-392] |
| 11 | 3626 | HLFALSTLYFYKFFLPTILS | TMEM31 | 11 | 4949 | LLTQNWVQEKYLVYRQVPGT | MAGE-A11 |
| | | | [126-145] | | | | [358-377] |
| 11 | 3627 | PSSRPRLLWQTPTTQTLPST | TSP50 | 11 | 4950 | EEQETASSSSTLVEVTLREV | MAGE-A12 |
| | | | [66-85] | | | | [34-53] |
| 11 | 3628 | NLNSHLIRHQRIHTREKPYE | ZNF165 | 11 | 4951 | VAELVRFLLRKYQIKEPVTK | MAGE-A8 |
| | | | [410-429] | | | | [116-135] |
| 12 | 3629 | NRKVSRMRCLQNETYSALSP | ACRBP | 11 | 4952 | LNGASRRLELVFGLDLKEDN | MAGE-B1 |
| | | | [501-520] | | | | [150-169] |
| 12 | 3630 | QRVAPEMFFSPQVFEQPGPS | ACTL8 | 11 | 4953 | NSATEEEIWEFLNMLGVYDG | MAGE-B2 |
| | | | [252-271] | | | | [216-235] |
| 12 | 3631 | YVGKFLLQIPRATIIYANIS | ADAM2 | 11 | 4954 | SKMKVLEFWAKVNKTVPSAF | MAGE-B3 |
| | | | [549-568] | | | | [284-303] |
| 12 | 3632 | LLHCLGVFLSCSGHIQDEHP | ADAM29 | 11 | 4955 | FRKVSQRTELVFGLALKEVN | MAGE-B4 |
| | | | [6-25] | | | | [151-170] |
| 12 | 3633 | LAVSVILRVAKGYQELLEKC | AFP | 11 | 4956 | PHSSPPYYEFLWGPRAHSES | MAGE-C2 |
| | | | [365-384] | | | | [290-309] |
| 12 | 3634 | CPGSTMGYMAQSTQYEKCGG | AKAP-4 | 11 | 4957 | QKFGDFLQHSPSILQSKAKK | MPHOSPH1 |
| | | | [570-589] | | | | [1731-1750] |
| 12 | 3635 | QQDTKGDYQKALLYLCGGDD | ANXA2 | 11 | 4958 | HQKYLSAPERAHLAKNLKLT | NKX3.1 |
| | | | [320-339] | | | | [145-164] |
| 12 | 3636 | MISSKPRLVVPYGLKTLLEG | CABYR | 11 | 4959 | SDEGMEVIERLIYLYHKFHQ | NR6A1 |
| | | | [1-20] | | | | [362-381] |
| 12 | 3637 | LIHCSGEMLKFTEKSLAKSI | CAGE1 | 11 | 4960 | PSLSQEQQEMVQAFSAQSGM | NXF2 |
| | | | [193-212] | | | | [566-585] |
| 12 | 3638 | ILHFKNKYHENKKLIRCKVD | CALR3 | 11 | 4961 | IEVHNKASLTPLLLSITKRS | NY-BR-1 |
| | | | [147-166] | | | | [109-128] |
| 12 | 3639 | LNFNVENSQELIQMYDSKME | CCDC62 | 11 | 4962 | LKEKIVLTHNRLKSLMKILS | OIP5 |
| | | | [299-318] | | | | [199-218] |
| 12 | 3640 | GDCEGVIFEGEPMYLNVGEV | CT46 | 11 | 4963 | MQKLGFGTGVNVYLMKRSPR | PBK |
| | | | [196-215] | | | | [35-54] |
| 12 | 3641 | GFVPPPLAPIRGLLFPVDTR | CTAGE2 | 11 | 4964 | YNVTSDYAVHPMSPVGRTSR | PEPP2 |
| | | | [659-678] | | | | [128-147] |
| 12 | 3642 | PGFVPPPLAPIRGPLFPVDA | cTAGE5 | 11 | 4965 | VGQSIHREPNLSLSNRLYYL | PIWIL1 |
| | | | [689-708] | | | | [842-861] |
| 12 | 3643 | GCGIHAIELNPSRTLLATGG | DCAF12 | 11 | 4966 | VAGSMGFNVDYPKIIKVQEN | PIWIL4 |
| | | | [140-159] | | | | [509-528] |
| 12 | 3644 | LQFHAGQAWVPTTHRRMISL | DPPA2 | 11 | 4967 | NLRRLLLSHIHASSYISPEK | PRAME |
| | | | [241-260] | | | | [261-280] |
| 12 | 3645 | KFITSILYENNVITIDLVQN | EpCAM | 11 | 4968 | EENSRLLQERGVAYINADSS | PSMA |
| | | | [179-198] | | | | [436-455] |
| 12 | 3646 | TWDQVITLDQVLDEVIPIHG | FAM46D | 11 | 4969 | KRRGPAYVMELPKLKLSGVV | RAGE-1 |
| | | | [10-29] | | | | [339-358] |
| 12 | 3647 | YFKIWAFLDVSFVERILKSQ | FBXO39 | 11 | 4970 | QVISVTFEKALNAGFIQATD | SART3 |
| | | | [370-389] | | | | [397-416] |
| 12 | 3648 | ISLILVCLPIYCRSLFWRSE | FMR1NB | 11 | 4971 | DSDPALQKVNFLPVLEQVGN | SCP-1 |
| | | | [193-212] | | | | [63-82] |
| 12 | 3649 | SNLRKICSPEAGLAEYLFDK | FTHL17 | 11 | 4972 | DVIEGKTAVIEKRRKKRSSA | SCP3a |
| | | | [154-173] | | | | [41-60] |
| 12 | 3650 | AARDGHTQVVALLVAHGAEV | GASZ | 11 | 4973 | EAQNKELKTQVALSSETPRT | se57-1 |
| | | | [156-175] | | | | [289-308] |
| 12 | 3651 | RDGTGHYLCNACGLYHKMNG | GATA-3 | 11 | 4974 | DLNKVILLDPSIIEAKMELE | SPAG1 |
| | | | [277-296] | | | | [713-732] |
| 12 | 3652 | RLAQSYLKEPMIVYVGTLDL | HAGE | 11 | 4975 | DIMRDRIEQVRRSISRLTDV | SPATA19 |
| | | | [436-455] | | | | [134-153] |
| 12 | 3653 | LPYSEYFEYFAPDFTLHPDV | HDAC3 | 11 | 4976 | PNRGNQVERPQMTFGRLQGI | SSX-2 |
| | | | [323-342] | | | | [88-107] |
| 12 | 3654 | IFCIALILGAFFYWRSKNKE | IGFS11 | 11 | 4977 | AQIPEKIQKAFDDIAKYFSK | SSX-3 |
| | | | [255-274] | | | | [15-34] |
| 12 | 3655 | DLNKGIEAKIHTLLPWQCTN | IL13RA2 | 11 | 4978 | KDKLKIDLLPDGRHAVVEVE | TAF7L |
| | | | [96-115] | | | | [126-145] |
| 12 | 3656 | LYALPCVLSQTPLLKDLLNR | JARID1B | 11 | 4979 | DFSTKSVFSKFAQLNLAAED | TAG-1 |
| | | | [849-868] | | | | [214-233] |
| 12 | 3657 | PCDLPLRLLVPTQFVGAIIG | KOC1 | 11 | 4980 | LQVRGAEASRLWASRLTDDS | TEKT5 |
| | | | [193-212] | | | | [100-119] |
| 12 | 3658 | WLIHGYRPVGSIPLWLQNFV | LIPI | 11 | 4981 | EDIPEISRLSISQKLPSTTM | THEG |
| | | | [99-118] | | | | [97-116] |
| 12 | 3659 | EEGPSTSCILESLFRAVITK | MAGE-A1 | 11 | 4982 | MDVLLRVFVERRQQYFSDLF | TPTE |
| | | | [85-104] | | | | [139-158] |
| 12 | 3660 | PQSAQIACSSPSVVASLPLD | MAGE-A10 | 11 | 4983 | DDERMEQMSNMTLMKETIST | TSGA10 |
| | | | [84-103] | | | | [155-174] |
| 12 | 3661 | CIPEEVMWEVLSIMGVYAGR | MAGE-A11 | 11 | 4984 | YEVEAYRRRHHNSSLNFFNW | TSPY1 |
| | | | [328-347] | | | | [241-260] |
| 12 | 3662 | MVELVHFLLLKYRAREPVTK | MAGE-A2 | 11 | 4985 | FLLHHAFVDSIFEQWLRRHR | TYR |
| | | | [113-132] | | | | [386-405] |
| 12 | 3663 | EFQAALSRKVAELVHFLLLK | MAGE-A3 | 11 | 4986 | GATLKGVAAGSSSSVKWTEG | WT1 |
| | | | [104-123] | | | | [244-263] |
| 12 | 3664 | FPDIFSKASECMQVIFGIDV | MAGE-A8 | 12 | 4987 | DERQNRSFEGMVVAALLAGR | 5T4 |
| | | | [150-169] | | | | [188-207] |
| 12 | 3665 | RRKLLMPLLGVIFLNGNSAT | MAGE-B2 | 12 | 4988 | QKATDIMDAMLRKLYNVMFA | AKAP-3 |
| | | | [200-219] | | | | [368-387] |
| 12 | 3666 | NCAREEEIWEFLNMLGIYDG | MAGE-B4 | 12 | 4989 | ELEHLQTVKNISPLQILPPS | BRDT |
| | | | [213-232] | | | | [743-762] |
| 12 | 3667 | AYAETTKMRVLRVLADSSNT | MAGE-B6 | 12 | 4990 | QEKRGAVYEAVTTINQEIQK | CDCA1 |
| | | | [363-382] | | | | [381-400] |
| 12 | 3668 | LGLSNIKFRPGSVVVQLTLA | MUC-1 | 12 | 4991 | QLQVQREIVNKHNELRKAVS | CRISP2 |
| | | | [1087-1106] | | | | [33-52] |
| 12 | 3669 | DRFLYTFYFCCRELRELPPT | NLAP4 | 12 | 4992 | MMQKPGSNAPVGGNVTSSFS | CT45 |
| | | | [180-199] | | | | [84-103] |
| 12 | 3670 | MSVPPHYQYIPHLFSYSGHS | NA6A1 | 12 | 4993 | QLLAERTKEQLFFVETMSGD | CTCFL |
| | | | [217-236] | | | | [190-209] |
| 12 | 3671 | LRHTPYSIRCERRMKWHSED | NXF2 | 12 | 4994 | ADMADVMRLLSHLKIVEEAL | CTNNA2 |
| | | | [76-95] | | | | [141-160] |
| 12 | 3672 | LLWKKIHRMVILTILAIAPS | NYD-TSPG | 12 | 4995 | VEEDKPHYGLRAIKVDVVPR | CXorf48 |
| | | | [340-359] | | | | [80-99] |
| 12 | 3673 | RRDIKKVDRELRQLRCIDEF | ODF1 | 12 | 4996 | SMVENKLVELEHTLLSKGFR | CXorf61 |
| | | | [12-31] | | | | [85-104] |
| 12 | 3674 | LPFQWRITHSFRWMAQVLAS | ODF4 | 12 | 4997 | VPPPRFRPRYRRPFRPRPRQ | DBPC |
| | | | [66-85] | | | | [272-291] |
| 12 | 3675 | LQEPCVAFNQQQLVQQEQHL | PASD1 | 12 | 4998 | KMTDNKTGEVLISENVVASI | DKKL1 |
| | | | [470-489] | | | | [108-127] |
| 12 | 3676 | LSHSPWAVKKINPICNDHYR | PBK | 12 | 4999 | PQYSMALAADSASGEVGNPL | DMRT1 |
| | | | [56-75] | | | | [229-248] |
| 12 | 3677 | TYKLCHIYYNWPGVIRVPAP | PIWIL1 | 12 | 5000 | GVPFRTVSEWLESIKMQQYT | EPHA2 |
| | | | [812-831] | | | | [903-922] |
| 12 | 3678 | CKYAHKLAFLSGHILHHEPA | PIWIL2 | 12 | 5001 | VAQTSLEEFNVLEMEVMARQ | FATE1 |
| | | | [944-963] | | | | [121-140] |
| 12 | 3679 | SEKILMQDHICQPVSAADWS | PIWIL4 | 12 | 5002 | KHNQDFIKRNIELAKESANP | FSIP1 |
| | | | [451-470] | | | | [249-268] |
| 12 | 3680 | CKKLKIFAMPMQDIKMILKM | PRAME | 12 | 5003 | ARRDLKVFGNFPKLIMTQVS | Glypican- |
| | | | [210-229] | | | | 3 |
| | | | | | | | [201-220] |
| 12 | 3681 | EGNYTLRVDCTPLMYSLVHN | PSMA | 12 | 5004 | SYTWDFGDSSGTLISRALVV | gp100 |
| | | | [457-476] | | | | [257-276] |
| 12 | 3682 | TVPPAFINMAATGVSSMSTR | SAGE1 | 12 | 5005 | PYNDYFEYFGPDFKLHISPS | HDAC1 |
| | | | [600-619] | | | | [329-348]; |
| | | | | | | | HDAC2 |
| | | | | | | | [330-349] |
| 12 | 3683 | RNCPWTVALWSRYLLAMERH | SART3 | 12 | 5006 | RQQTDMAVNWAGGLHHAKKS | HDAC2 |
| | | | [373-392] | | | | [127-146] |
| 12 | 3684 | GVRCICSQLSLTTKMDAEHP | SCRN1 | 12 | 5007 | LQEPSDLRAVLLINSKSYVS | KU-CT-1 |
| | | | [183-202] | | | | [592-611] |
| 12 | 3685 | TLIFSGFSGVPIVLAMTRVV | SLCO6A1 | 12 | 5008 | GETRLALVQRNVAIMKSIIP | LDHC |
| | | | [588-607] | | | | [103-122] |
| 12 | 3686 | AAAQQGFLFPPGITYKPGDN | SOX-6 | 12 | 5009 | AREPFTKAEMLGSVIRNFQD | MAGE-A12 |
| | | | [283-302] | | | | [126-145] |
| 12 | 3687 | SKAERFKMMLTLISKGQKEL | SPAG1 | 12 | 5010 | DGREHTVYGEPRKLLTQDWV | MAGE-A4 |
| | | | [877-896] | | | | [233-252] |
| 12 | 3688 | RYDEEVVKELMPLVVAVLEN | SPAG9 | 12 | 5011 | AEMLESVIKNYKRYFPVIFG | MAGE-A9 |
| | | | [41-60] | | | | [132-151] |
| 12 | 3689 | SFEAHHLTVPAIRWLGLLPS | SPO11 | 12 | 5012 | ETTKMKVLEFLAKMNGATPR | MAGE-B1 |
| | | | [297-316] | | | | [279-298] |
| 12 | 3690 | HNRRIQVEHPQMTFGRLHRI | SSX-1 | 12 | 5013 | LKKPQRALSTTTSVDVSYKK | MAGE-B3 |
| | | | [88-107] | | | | [62-81] |
| 12 | 3691 | PNRGNQVEHPQMTFGRLQGI | SSX-5 | 12 | 5014 | LQIPVSPSSSSTLLSLFQSF | MAGE-C1 |
| | | | [88-107] | | | | [233-252] |
| 12 | 3692 | KDLGEARTICEALQKELDSL | SYCE1 | 12 | 5015 | KDYFPVILKRAREFMELLFG | MAGE-C2 |
| | | | [72-91] | | | | [175-194] |
| 12 | 3693 | TPWMDYEFRVIASNILGTGE | TAG-1 | 12 | 5016 | LKSGSMRIGKDFILFTKKEE | MORC1 |
| | | | [676-695] | | | | [103-122] |
| 12 | 3694 | LRLRETQDTLQLLVMTKCRL | TEKT5 | 12 | 5017 | EENIGILPRTLNVLFDSLQE | MPHOSPH1 |
| | | | [431-450] | | | | [166-185] |
| 12 | 3695 | FCNDKDSLSQFWEFSETTAS | TEX101 | 12 | 5018 | RAHLAKNLKLTETQVKIWFQ | NKX3.1 |
| | | | [113-132] | | | | [154-173] |
| 12 | 3696 | EHSSKLRHPYLLQLMAVCLS | TEX14 | 12 | 5019 | SLVEKTPDEAASLVEGTSDK | NY-BR-1 |
| | | | [297-316] | | | | [263-282] |
| 12 | 3697 | QRILTVDSFAASSTVPHCEQ | TEX15 | 12 | 5020 | FKLENERLKASFAPMEDKLN | 0DF2 |
| | | | [1357-1376] | | | | [504-523] |
| 12 | 3698 | IPRSSLEYRASSRLKELAAP | THEG | 12 | 5021 | KASQPSFSIKGRSKLGGFSD | ODF3 |
| | | | [219-238] | | | | [155-174] |
| 12 | 3699 | PTILSLSFFILLVLLLLLFI | TMEM31 | 12 | 5022 | DQASFTTSMEWDTQVVKGSS | OIP5 |
| | | | [141-160] | | | | [29-48] |
| 12 | 3700 | LVDVVYIFFDIKLLRNIPRW | TPTE | 12 | 5023 | TEADRVIQRTNSMQQLEQWI | PEPP2 |
| | | | [171-190] | | | | [399-418] |
| 12 | 3701 | PEAVARRWPWMVSVRANGTH | TSP50 | 12 | 5024 | DVSHKLLRIETAYDFIKRTS | PIWIL3 |
| | | | [117-136] | | | | [283-302] |
| 12 | 3702 | QALVCASAKEGTAFRMEAVQ | TSPY1 | 12 | 5025 | QEAQPLQPSHFLDISEDWSL | PLAC1 |
| | | | [27-46] | | | | [184-203] |
| 12 | 3703 | EAPAFLPWHRLFLLRWEQEI | TYR | 12 | 5026 | LTSPSMEIKEVASIILHKDF | PRSS55 |
| | | | [203-222] | | | | [129-148] |
| 12 | 3704 | RNQGYSTVTFDGTPSYGHTP | WT1 | 12 | 5027 | YDPDERIAAHQALQHPYFQE | RAGE-1 |
| | | | [145-164] | | | | [268-287] |
| 12 | 3705 | CSECGRAFSQSSNLSQHQRI | ZNF165 | 12 | 5028 | FVPPRSSSSQVSAVKPQTLG | SCP-1 |
| | | | [458-477] | | | | [10-29] |
| 13 | 3706 | MNPEAIHFSGVKIFSNCSFE | ADAM2 | 12 | 5029 | RKRLEMYTKASLKTSNQKIE | SCP3a |
| | | | [338-357] | | | | [89-108] |
| 13 | 3707 | TMRSGFMQNEITCRMEFEEI | ADAM29 | 12 | 5030 | NLVQRMEKEKRTLLERKLSL | se57-1 |
| | | | [161-180] | | | | [193-212] |
| 13 | 3708 | SILDSYQCTAEISLADLATI | AFP | 12 | 5031 | EQVRRSISRLTDVSAQDFSM | SPATA19 |
| | | | [30-49] | | | | [141-160] |
| 13 | 3709 | GDLENAFLNLVQCIQNKPLY | ANXA2 | 12 | 5032 | PNRGNQVQRPQMTFGRLQGI | SSX-3 |
| | | | [250-269] | | | | [88-107] |
| 13 | 3710 | LQCSNLYLEKRVKELQMKIT | CAGE1 | 12 | 5033 | KQKNEKLISLQEQLQRFLKK | TAF7L |
| | | | [326-345] | | | | [443-462] |
| 13 | 3711 | LYPNPKPEVLHMIYMRALQI | CDCA1 | 12 | 5034 | IISDVLIDEHLVLKSASPHK | TDRD1 |
| | | | [36-55] | | | | [883-902] |
| 13 | 3712 | CGIAYCPNQDSLKYYYVCQY | CRISP2 | 12 | 5035 | DKKSENIASLGESLAMKEKT | TSGA10 |
| | | | [150-169] | | | | [278-297] |
| 13 | 3713 | VTSRLYVRREKKFAVALSGL | CTAGE2 | 13 | 5036 | LADLSPFAFSGSNASVSAPS | 5T4 |
| | | | [36-55] | | | | [154-173] |
| 13 | 3714 | CFRQKQLLNAHFRKYHDANF | CTCFL | 13 | 5037 | SPNTLKEIEASAEVSPTTMT | ACRBP |
| | | | [522-541] | | | | [131-150] |
| 13 | 3715 | GVKLVRMAATQIDSLCPQVI | CTNNA2 | 13 | 5038 | IERGRILNWEGVQYLWSFVL | ACTL8 |
| | | | [444-463] | | | | [67-86] |
| 13 | 3716 | SFCGDYGMIDESIYFSSDVV | CXorf48 | 13 | 5039 | PPSKKSFFYKEVFESRNGDY | AKAP-3 |
| | | | [45-64] | | | | [234-253] |
| 13 | 3717 | ATVPATAAGVVAVVVPVPAG | DBPC | 13 | 5040 | DIMEAMLKRLVSALIGEEKE | AKAP-4 |
| | | | [16-35] | | | | [421-440] |
| 13 | 3718 | VVHGRLLSADTKGWVALQFH | DPPA2 | 13 | 5041 | DEIEIDFETLKASTLRELEK | BRDT |
| | | | [225-244] | | | | [550-569] |
| 13 | 3719 | MAPPQVLAFGLLLAAATATF | EpCAM | 13 | 5042 | KTTSGMSKKSVESVKLAQLE | CABYR |
| | | | [1-20] | | | | [350-369] |
| 13 | 3720 | GMTKYDYLMTLHGVVNESTV | FAM46D | 13 | 5043 | QDWEKHFLDASTSKQSDWNG | CALR3 |
| | | | [292-311] | | | | [226-245] |
| 13 | 3721 | VLTKKFQVTMRGLLSCLSKS | FBXO39 | 13 | 5044 | EKQDYKQKLKALKIEVNKLK | CCDC62 |
| | | | [103-122] | | | | [204-223] |
| 13 | 3722 | RAMRVAHLELATYELAATES | FMR1NB | 13 | 5045 | ESPDLSISHSQVEQLVNKTS | CT46 |
| | | | [17-36] | | | | [306-325] |
| 13 | 3723 | PASSSSLSGGHASPHLFTFP | GATA-3 | 13 | 5046 | TLEGERNQIYIQLSEVDKTK | cTAGE5 |
| | | | [135-154] | | | | [328-347] |
| 13 | 3724 | LQVTRIFLQALNLGIEVINT | Glypican- | 13 | 5047 | SRDILNNFPHSIARQKRILV | CXorf61 |
| | | | 3 | | | | [63-82] |
| | | | [223-242] | | | | |
| 13 | 3725 | FYTTDRVMTVSFHKYGEYFP | HDAC1 | 13 | 5048 | VVDVQTSQITKIPILKDREP | DCAF12 |
| | | | [187-206]; | | | | [114-133] |
| | | | HDAC2 | | | | |
| | | | [188-207] | | | | |
| 13 | 3726 | NANIPSIYANGTHLVPGQHK | IGFS11 | 13 | 5049 | EVLISENVVASIQPAEGSFE | DKKL1 |
| | | | [351-370] | | | | [116-135] |
| 13 | 3727 | VIFVTGLLLRKPNTYPKMIP | IL13RA2 | 13 | 5050 | GISHPIPLPSAAELLVKREN | DMRT1 |
| | | | [355-374] | | | | [132-151] |
| 13 | 3728 | ENDQVVVKITGHFYACQVAQ | KOC1 | 13 | 5051 | DLAPDTTYLVQVQALTQEGQ | EPHA2 |
| | | | [531-550] | | | | [496-515] |
| 13 | 3729 | IQSAYEIIKLKGYTSWAIGL | LDHC | 13 | 5052 | KAAGSASAKRVWNMTATRPK | FATE |
| | | | [235-254] | | | | [57-76] |
| 13 | 3730 | FNTQKKTVWLIHGYRPVGSI | LIPI | 13 | 5053 | SKTLGIGRLKRPSFLDDPLY | FSIP1 |
| | | | [91-110] | | | | [524-543] |
| 13 | 3731 | EALNMMGLYDGMEHLIYGEP | MAGE-A10 | 13 | 5054 | EAGLAEYLFDKLTLGGRVKE | FTHL17 |
| | | | [248-267] | | | | [163-182] |
| 13 | 3732 | KVLHHLLKISGGPHISYPPL | MAGE-A12 | 13 | 5055 | PVNSQKITLEWASPQNFTSV | GASZ |
| | | | [285-304] | | | | [382-401] |
| 13 | 3733 | EQQTASSSSTLVEVTLGEVP | MAGE-A2 | 13 | 5056 | MEVTVYHRRGSRSYVPLAHS | gp100 |
| | | | [35-54] | | | | [184-203] |
| 13 | 3734 | AEMLGSVVGNWQYFFPVIFS | MAGE-A3 | 13 | 5057 | KALENFKTGKVRILIATDLA | HAGE |
| | | | [133-152]; | | | | [528-547] |
| | | | MAGE-A6 | | | | |
| | | | [133-152] | | | | |
| 13 | 3735 | WEAGMLMHFILRKYKMREPI | MAGE-B1 | 13 | 5058 | QNSRQYLDQIRQTIFENLKM | HDAC3 |
| | | | [110-129] | | | | [349-368] |
| 13 | 3736 | VVFGLELNKVNPNGHTYTFI | MAGE-B2 | 13 | 5059 | SIPVHLNSLPRLETLVAEVQ | JARID1B |
| | | | [162-181] | | | | [1048-1067] |
| 13 | 3737 | LCNDVLAMKRSSSLPSWKSL | MORC1 | 13 | 5060 | THEDKIVRRNATMIFGILAS | KU-CT-1 |
| | | | [757-776] | | | | [77-96] |
| 13 | 3738 | MTPGTQSPFFLLLLLTVLTV | MUC-1 | 13 | 5061 | APEEEIWEELSVMEVYDGRE | MAGE-A1 |
| | | | [1-20] | | | | [209-228] |
| 13 | 3739 | AELFALLCRLADELLFRQIA | NR6A1 | 13 | 5062 | TVRPADLTRVIMPLEQRSQH | MAGE-A11 |
| | | | [281-300] | | | | [100-119] |
| 13 | 3740 | HENENYLLHENCMLKKEIAM | NY-BR-1 | 13 | 5063 | PVIFGKASESLKMIFGIDVK | MAGE-A4 |
| | | | [1038-1057] | | | | [149-168] |
| 13 | 3741 | SQALGSLRTTTPAFTLNIPS | NYD-TSPG | 13 | 5064 | TKAEMLESVIKNYKNHFPDI | MAGE-A8 |
| | | | [12-31] | | | | [134-153] |
| 13 | 3742 | ENRYDCLGSKKYSYMNICKE | ODF1 | 13 | 5065 | EPRKLLTQDWVQENYLEYRQ | MAGE-A9 |
| | | | [155-174] | | | | [240-259] |
| 13 | 3743 | RTKAFRVDSTPGPAAYMLPM | ODF3 | 13 | 5066 | QSRTDPLIMKTNMLVQFLME | MAGE-B3 |
| | | | [127-146] | | | | [105-124] |
| 13 | 3744 | KVTFIFSTLMLFPINIWIFE | ODF4 | 13 | 5067 | TTAMTSAYSRATSSSSSQPM | MAGE-B4 |
| | | | [151-170] | | | | [327-346] |
| 13 | 3745 | KSSQRKLNWIPSFPTYDYFN | PASD1 | 13 | 5068 | EYKPYFPQILNRTSQHLVVA | MAGE-B6 |
| | | | [15-34] | | | | [228-247] |
| 13 | 3746 | MARGLKYLHQEKKLLHGDIK | PBK | 13 | 5069 | PLQSPVISFSSSTSLSPFSE | MAGE-C1 |
| | | | [150-169] | | | | [850-869] |
| 13 | 3747 | FVASINLTLTKWYSRVVFQM | PIWIL2 | 13 | 5070 | EEEEEASSASSTLYLVFSPS | MAGE-C2 |
| | | | [760-779] | | | | [34-53] |
| 13 | 3748 | MSLKGHLQSVTAPMGITMKP | PIWIL3 | 13 | 5071 | KKIIETMSSSKLSNVEASKE | MPHOSPH1 |
| | | | [523-542] | | | | [1749-1768] |
| 13 | 3749 | PSLSHCSQLTTLSFYGNSIS | PRAME | 13 | 5072 | LSSELGDLEKHSSLPALKEE | NKX3.1 |
| | | | [400-419] | | | | [184-203] |
| 13 | 3750 | VLPGLTYLTVAGIPAMSTRD | SAGE1 | 13 | 5073 | KFKEHLKQMTLQLELKQIPW | NLRP4 |
| | | | [554-573] | | | | [25-44] |
| 13 | 3751 | FIDENVATHSAGIYLGIAEC | SLCO6A1 | 13 | 5074 | SETLKHLVLQFLQQYYSIYD | NXF2 |
| | | | [253-272] | | | | [385-404] |
| 13 | 3752 | CWPTGGATVAEARVYRDARG | SOX-6 | 13 | 5075 | ELSKSMESMRGHLQAQLRSK | ODF2 |
| | | | [594-613] | | | | [337-356] |
| 13 | 3753 | KEACAHLLAITAPKDLPMFL | SPAG1 | 13 | 5076 | IVNASEMDIQNVPLSEKIAE | OIP5 |
| | | | [822-841] | | | | [179-198] |
| 13 | 3754 | AGSIYREFERLIGRYDEEVV | SPAG9 | 13 | 5077 | YSPQRTYRSEVSSPIQRGDV | PEPP2 |
| | | | [28-47] | | | | [556-575] |
| 13 | 3755 | YVYMKRKYEAMTKLGFKAIL | SSX-3 | 13 | 5078 | LQFYNIIFRRLLKIMNLQQI | PIWIL1 |
| | | | [48-67] | | | | [209-228] |
| 13 | 3756 | IKATKPLLMEQYCSIKIVDI | TDRD1 | 13 | 5079 | DYPKIIKVQENPAAFVRAIQ | PIWIL4 |
| | | | [396-415] | | | | [518-537] |
| 13 | 3757 | KCCGLTSLPAVQAPVIQECY | TEKT5 | 13 | 5080 | LYSEELFPEELSVVLGTNDL | PRSS55 |
| | | | [17-36] | | | | [110-129] |
| 13 | 3758 | EVKGCTAMIGCRLMSGILAV | TEX101 | 13 | 5081 | SFDSLFSAVKNFTEIASKFS | PSMA |
| | | | [181-200] | | | | [628-647] |
| 13 | 3759 | ILKKGIYVDAVNSLGQTALF | TEX14 | 13 | 5082 | YVMELPKLKLSGVVRLSSYS | RAGE-1 |
| | | | [42-61] | | | | [345-364] |
| 13 | 3760 | PTLRSLLWYDETLYAELLGK | TEX15 | 13 | 5083 | AIVEAARLEKVHSLFRRQLA | SART3 |
| | | | [1714-1733] | | | | [237-256] |
| 13 | 3761 | KRYVAYFAQVKHLYNWNLPP | TPTE | 13 | 5084 | EETRQVYMDLNNNIEKMITA | SCP-1 |
| | | | [391-410] | | | | [205-224] |
| 13 | 3762 | PRTSAPSRAGALLLLLLLLR | TSP50 | 13 | 5085 | LQQSRIVQSQRLKTIKQLYE | SCP3a |
| | | | [14-33] | | | | [161-180] |
| 13 | 3763 | YRVPERLRQGFCGVGRAAQA | TSPY1 | 13 | 5086 | DRDEAWVLETIGKYWAAEKV | SCRN1 |
| | | | [9-28] | | | | [161-180] |
| 13 | 3764 | LAVLYCLLWSFQTSAGHFPR | TYR | 13 | 5087 | KQEDSKQLLQVNKLEKEQKL | se57-1 |
| | | | [3-22] | | | | [148-167] |
| 14 | 3765 | YASWFESFCQFTHYRCSNHV | ACRBP | 13 | 5088 | FLPITSSDIDVVESEAVSVL | SPATA19 |
| | | | [96-115] | | | | [20-39] |
| 14 | 3766 | MAARTVIIDHGSGFLKAGTA | ACTL8 | 13 | 5089 | ADSKMKAEIQALTFLSSDYL | SPO11 |
| | | | [1-20] | | | | [362-381] |
| 14 | 3767 | SKPMRWPFFLFIPFFIIFCV | ADAM2 | 13 | 5090 | LQIEEEKNKQRQLRLAFEEQ | SYCE1 |
| | | | [682-701] | | | | [142-161] |
| 14 | 3768 | NIVDSILDVIGVKVLLFGLE | ADAM29 | 13 | 5091 | GSIPGFLISSGMSSHKQGHT | TAF7L |
| | | | [230-249] | | | | [295-314] |
| 14 | 3769 | LTSSELMAITRKMAATAATC | AFP | 13 | 5092 | TDGRHFVSQTTGNLYIARTN | TAG-1 |
| | | | [442-461] | | | | [179-198] |
| 14 | 3770 | TNSLQKQLQAVLQWIAASQF | AKAP-4 | 13 | 5093 | EDTTLTITVPAVSRRVEELS | THEG |
| | | | [767-786] | | | | [179-198] |
| 14 | 3771 | ASALKSALSGHLETVILGLL | ANXA2 | 13 | 5094 | ENELDSAHSEIELLRSQMAN | TSGA10 |
| | | | [84-103] | | | | [540-559] |
| 14 | 3772 | NGKSQYYIMFGPDICGFDIK | CALR3 | 13 | 5095 | IQDVRRVPGVAPTLVRSASE | WT1 |
| | | | [123-142] | | | | [297-316] |
| 14 | 3773 | KALESNQMECQTALQKTQLQ | CCDC62 | 13 | 5096 | EHGQEIFQKKVSPPGPALNV | ZNF165 |
| | | | [94-113] | | | | [142-161] |
| 14 | 3774 | PRYNVAEIVIHIRNKILTGA | CDCA1 | 14 | 5097 | GYHYRYEINADPRLTNLSSN | 5T4 |
| | | | [7-26] | | | | [398-417] |
| 14 | 3775 | SREVTTNAQRWANKCTLQHS | CRISP2 | 14 | 5098 | MDTSTDPVRVLSWLRRDLEK | AKAP-3 |
| | | | [64-83] | | | | [32-51] |
| 14 | 3776 | EHQSLVLVKALLAVSVSCIT | CT46 | 14 | 5099 | PNHHQLAFNYQELEHLQTVK | BRDT |
| | | | [23-42] | | | | [732-751] |
| 14 | 3777 | GTGVQSTFTTFYEVDCDVID | CTNNA2 | 14 | 5100 | DQAPEVTLQADIEVMSTVHI | CABYR |
| | | | [810-829] | | | | [274-293] |
| 14 | 3778 | IHTEEVCITSVHGRNGVIDY | CXorf48 | 14 | 5101 | SDEAKSIRDVPTLLGAKLDK | CAGE1 |
| | | | [175-194] | | | | [674-693] |
| 14 | 3779 | FYLLLASSILCALIVFWKYR | CXorf61 | 14 | 5102 | SKSLKSQVAEAKMTFKRFQA | CTAGE2 |
| | | | [3-22] | | | | [150-169] |
| 14 | 3780 | RNYFSDIDFFPNAVYTHCYD | DCAF12 | 14 | 5103 | AEAKMTFKIFQMNEERLKIA | cTAGE5 |
| | | | [408-427] | | | | [188-207] |
| 14 | 3781 | QASGVRWCVVHGRLLSADTK | DPPA2 | 14 | 5104 | AFQDSVLEEEVELVLAPSEE | CTCFL |
| | | | [217-236] | | | | [55-74] |
| 14 | 3782 | GIAAGMKYLANMNYVHRDLA | EPHA2 | 14 | 5105 | PQRPRNRPYFQRARQQAPGP | DBPC |
| | | | [722-741] | | | | [316-335] |
| 14 | 3783 | LHLITMMALKVLGELNILPN | FAM46D | 14 | 5106 | LFSAPMDFRGLPGNYHKEEN | DKKL1 |
| | | | [322-341] | | | | [71-90] |
| 14 | 3784 | LIIAVLVSASIANLWLWMNQ | FATE1 | 14 | 5107 | VENTPDLVSDSTYYSSFYQP | DMRT1 |
| | | | [164-183] | | | | [197-216] |
| 14 | 3785 | LPIYCRSLFWRSEPADDLQR | FMR1NB | 14 | 5108 | TVNGEQLDLDPGQTLIYYVD | EpCAM |
| | | | [200-219] | | | | [234-253] |
| 14 | 3786 | YTSYLYLSMAFYFNRDDVAL | FTHL17 | 14 | 5109 | KYRKLIESELSYFVIVYSVM | FBXO39 |
| | | | [30-49] | | | | [423-442] |
| 14 | 3787 | VSTWNSRILKRTAITICGFG | GASZ | 14 | 5110 | DIEDVTPVFPQLSRSIISKL | FSIP1 |
| | | | [443-462] | | | | [433-452] |
| 14 | 3788 | RAMLGTHTMEVTVYHRRGSR | gp100 | 14 | 5111 | SSFNPAALSRHMSSLSHISP | GATA-3 |
| | | | [176-195] | | | | [390-409] |
| 14 | 3789 | KIKNIQSTTNTTIQIIQEQP | HAGE | 14 | 5112 | EAFEIVVRHAKNYTNAMFKN | Glypican- |
| | | | [89-108] | | | | 3 |
| | | | | | | | [113-132] |
| 14 | 3790 | EAIFKPVMSKVMEMFQPSAV | HDAC1 | 14 | 5113 | GEARLREMEALQSLRLANEG | JARID1B |
| | | | [238-257] | | | | [1146-1165] |
| 14 | 3791 | FCSRYTGASLQGATQLNNKI | HDAC3 | 14 | 5114 | GGLKKLLSFAENSTIPDIQK | KU-CT-1 |
| | | | [103-122] | | | | [274-293] |
| 14 | 3792 | MPATNVSIFINNTQLSDTGT | IGFS11 | 14 | 5115 | GSDPRSFPLWYEEALKDEEE | MAGE-A10 |
| | | | [98-117] | | | | [320-339] |
| 14 | 3793 | WEGEDLSKKTLLRFWLPFGF | IL13RA2 | 14 | 5116 | REDSGDFGLQVSTMFSEDDF | MAGE-A11 |
| | | | [331-350] | | | | [23-42] |
| 14 | 3794 | SMNLQAHLIPGLNLNALGLF | KOC1 | 14 | 5117 | APEEKIWEELSMLEVFEGRE | MAGE-A2 |
| | | | [357-376] | | | | [216-235] |
| 14 | 3795 | VIGSGCNLDSARFRYLIGEK | LDHC | 14 | 5118 | KASSSLQLVFGIELMEVDPI | MAGE-A3 |
| | | | [158-177] | | | | [153-172] |
| 14 | 3796 | LETNCNFISFPCRSYKDYKT | LIPI | 14 | 5119 | AASSSSTLIMGTLEEVTDSG | MAGE-A8 |
| | | | [285-304] | | | | [38-57] |
| 14 | 3797 | PARYEFLWGPRALAETSYVK | MAGE-A1 | 14 | 5120 | EEPSSSVDPAQLEFMFQEAL | MAGE-A9 |
| | | | [259-278] | | | | [89-108] |
| 14 | 3798 | CAPEEKIWEELSVLEASDGR | MAGE-A12 | 14 | 5121 | GEPRKFITQDLVQEKYLKYE | MAGE-B1 |
| | | | [215-234] | | | | [239-258] |
| 14 | 3799 | ELVTKAEMLERVIKNYKRCF | MAGE-A4 | 14 | 5122 | AETSKMKVLEFLAKVNGTTP | MAGE-B2 |
| | | | [129-148] | | | | [281-300] |
| 14 | 3800 | VAKLVHFLLLKYRAREPVTK | MAGE-A6 | 14 | 5123 | NSNPARYEFLWGPRAHAETS | MAGE-B3 |
| | | | [113-132] | | | | [265-284] |
| 14 | 3801 | AGARPRVAARRGTTAMTSAY | MAGE-B4 | 14 | 5124 | PHLYEDALIDEVERALRLRA | MAGE-B6 |
| | | | [315-334] | | | | [388-407] |
| 14 | 3802 | EEVIWEVLNAVGVYAGREHF | MAGE-C2 | 14 | 5125 | SDEQGMSQNRLLILILSIIF | MAGE-C1 |
| | | | [246-265] | | | | [989-1008] |
| 14 | 3803 | KCGTLLVIYNLKLLLNGEPE | MORC1 | 14 | 5126 | TSASGSASGSASTLVHNGTS | MUC-1 |
| | | | [193-212] | | | | [959-978] |
| 14 | 3804 | TTQKEFFQGCIMQPVKDLLK | MPHOSPH1 | 14 | 5127 | EAFSRASLVSVYNSYPYYPY | NKX3.1 |
| | | | [123-142] | | | | [203-222] |
| 14 | 3805 | NRFPDLMMCLPEIRYIAGKM | NR6A1 | 14 | 5128 | MAASFFSDFGLMWYLEELKK | NLRP4 |
| | | | [435-454] | | | | [1-20] |
| 14 | 3806 | QTERMLCFSVNGVFKEVEGQ | NXF2 | 14 | 5129 | RADPVDLEFSVDQVDSVDQE | PASD1 |
| | | | [491-510] | | | | [298-317] |
| 14 | 3807 | INLVDVYGNTALHYAVYSEI | NY-BR-1 | 14 | 5130 | SATEVGRIQASPLPRSVDLS | PIWIL4 |
| | | | [76-95] | | | | [17-36] |
| 14 | 3808 | FSDFKDFIFDDMYIVQKYIS | NYD-TSPG | 14 | 5131 | KYADKIYSISMKHPQEMKTY | PSMA |
| | | | [225-244] | | | | [606-625] |
| 14 | 3809 | IEAARRQFQSQLADLQQLPD | ODF2 | 14 | 5132 | YVEIWQAYLDYLARRVDFKQ | SART3 |
| | | | [582-601] | | | | [417-436] |
| 14 | 3810 | TKPCAPVVTFGIKHSDYMTP | ODF3 | 14 | 5133 | MEKQKPFALFVPPRSSSSQV | SCP-1 |
| | | | [229-248] | | | | [1-20] |
| 14 | 3811 | KSFWSLILSHPSGAVSCSSS | ODF4 | 14 | 5134 | IEKARKKASSAGVVEDMGGE | SCP3a |
| | | | [205-224] | | | | [50-69] |
| 14 | 3812 | PLGPAGLGAEEPAAGPQLPS | OIP5 | 14 | 5135 | QDKRIENLREKVNILEAQNK | se57-1 |
| | | | [49-68] | | | | [274-293] |
| 14 | 3813 | GYRAFTEANDGSLCLAMEYG | PBK | 14 | 5136 | LKNNLIEKDPSLVYQHLLYL | SPAG1 |
| | | | [99-118] | | | | [857-876] |
| 14 | 3814 | GILGSILLPSFQIALLTSED | PEPP2 | 14 | 5137 | KTRDGGSVVGASVFYKDVAG | SPAG9 |
| | | | [209-228] | | | | [699-718] |
| 14 | 3815 | LRDWGLSFDSNLLSFSGRIL | PIWIL1 | 14 | 5138 | PDVENEVKALLRSDAEAVST | TAF7L |
| | | | [438-457] | | | | [259-278] |
| 14 | 3816 | TITSCEWVDFYLLAHHVRQG | PIWIL2 | 14 | 5139 | WKRLGWSESSRIIVLDQSDL | TEX14 |
| | | | [880-899] | | | | [1476-1495] |
| 14 | 3817 | TYCLCHMYYNLPGIIRVPAP | PIWIL3 | 14 | 5140 | PSSRILQLSKPKAPATLLEE | THEG |
| | | | [833-852] | | | | [264-283] |
| 14 | 3818 | TWKLPTLAKFSPYLGQMINL | PRAME | 14 | 5141 | DLKIQIEMEKKVVFSTISLG | TPTE |
| | | | [243-262] | | | | [430-449] |
| 14 | 3819 | SVLLLLSLVTGTQLGPRTPL | PRSS55 | 14 | 5142 | KVITKEYLVNITEYRASHST | TSPY1 |
| | | | [5-24] | | | | [214-233] |
| 14 | 3820 | PLLTTNLSPQCLSLLHAMVA | RAGE-1 | 14 | 5143 | FINHQIIYAGEKNHQYGKSF | ZNF165 |
| | | | [248-267] | | | | [307-326] |
| 14 | 3821 | RRFGQNYERIFILLEEVQGS | SAGE1 | 15 | 5144 | EDVVLRWSQEFSTLTLGQFG | ACRBP |
| | | | [836-855] | | | | [524-543] |
| 14 | 3822 | IHYFTGTPDPSRSIFKPFIF | SCRN1 | 15 | 5145 | QKQSSYVGWWIHFRIVEIVV | ADAM29 |
| | | | [291-310] | | | | [185-204] |
| 14 | 3823 | VIVSTLEMSCKALMRFIMVT | SLCO6A1 | 15 | 5146 | ERQLNEAVGNVTPLQLLDWL | AKAP-3 |
| | | | [442-461] | | | | [830-849] |
| 14 | 3824 | QIQVQGHMPPLMIPIFPHDQ | SOX-6 | 15 | 5147 | VPHLQKVFDRYKSYSPYDML | ANXA2 |
| | | | [257-276] | | | | [222-241] |
| 14 | 3825 | NCTCGATAVAVPSNIQGIRN | SPO11 | 15 | 5148 | KNGRLTNQLQYLQKVVLKDL | BRDT |
| | | | [193-212] | | | | [24-43] |
| 14 | 3826 | AHRKHTMLQECKERISALNL | SYCE1 | 15 | 5149 | APGHMSDVEWMSIFKPSKMQ | CCDC62 |
| | | | [123-142] | | | | [525-544] |
| 14 | 3827 | RNGGTSMMVENMAVRPAPHP | TAG-1 | 15 | 5150 | LKEFEKTIHFYQKKIILHEK | CTAGE2 |
| | | | [1002-1021] | | | | [408-427] |
| 14 | 3828 | VIYSPGEFYCHVLKEDALKK | TDRD1 | 15 | 5151 | SIYFSSDVVTGNVPLKVGQK | CXorf48 |
| | | | [722-741] | | | | [56-75] |
| 14 | 3829 | QAPVIQECYQPYYLPGYRYL | TEKT5 | 15 | 5152 | VPVKGSRYAPNARKSRAFIP | DBPC |
| | | | [28-47] | | | | [166-185] |
| 14 | 3830 | ADPANMFNWTTEEVETCDKG | TEX101 | 15 | 5153 | DAQESSLGLTGLQSLLQGFS | DKKL1 |
| | | | [38-57] | | | | [37-56] |
| 14 | 3831 | LICREDNAVSAATALLESEE | TEX15 | 15 | 5154 | AISYRKFTSASDVWSFGIVM | EPHA2 |
| | | | [541-560] | | | | [788-807] |
| 14 | 3832 | EQAQEEITRLRREMMKSCKS | TSGA10 | 15 | 5155 | VESAVWYVKKFGRYLEHLEV | FBXO39 |
| | | | [69-88] | | | | [75-94] |
| 14 | 3833 | KLKQELKYSNYVRPICLPGT | TSP50 | 15 | 5156 | KRKRKSEMLQKAARGREEHG | FMR1NB |
| | | | [211-230] | | | | [234-253] |
| 14 | 3834 | LYRNGDFFISSKDLGYDYSY | TYR | 15 | 5157 | QGLEMRIKLWEEIKSAKYSE | FSIP1 |
| | | | [432-451] | | | | [142-161] |
| 14 | 3835 | SDNHTTPILCGAQYRIHTHG | WT1 | 15 | 5158 | LENFFRYFLRLSDDKMEHAQ | FTHL17 |
| | | | [273-292] | | | | [49-68] |
| 15 | 3836 | GLPHIRVFLDNNPWVCDCHM | 5T4 | 15 | 5159 | SKDQQKILAALKELQVEEIQ | GASZ |
| | | | [283-302] | | | | [320-339] |
| 15 | 3837 | TLYPGFTKRLFRELMGDHVS | ACTL8 | 15 | 5160 | KVKNQLRFLAELAYDLDVDD | Glypican- |
| | | | [302-321] | | | | 3 |
| | | | | | | | [515-534] |
| 15 | 3838 | PRTISLESLAVILAQLLSLS | ADAM2 | 15 | 5161 | SQKRSFVYVWKTWGQYWQVL | gp100 |
| | | | [299-318] | | | | [144-163] |
| 15 | 3839 | TSSYANRRPCFSSLVVDETY | AFP | 15 | 5162 | NLLLNYGLYRKMEIYRPHKA | HDAC1 |
| | | | [502-521] | | | | [40-59]; |
| | | | | | | | HDAC2 |
| | | | | | | | [41-60] |
| 15 | 3840 | PDGECSIDDLSFYVNRLSSL | AKAP-4 | 15 | 5163 | KKIRESYENDIASMNLQAHL | KOC1 |
| | | | [208-227] | | | | [345-364] |
| 15 | 3841 | PSSEAAEDVMVAAPLVCSGK | CABYR | 15 | 5164 | EALFKKSAETLWNIQKDLIF | LDHC |
| | | | [210-229] | | | | [313-332] |
| 15 | 3842 | FKKIKANYVCLQERYMTEMQ | CAGE1 | 15 | 5165 | KPPYSRLDYTDAKFVDVIHS | LIPI |
| | | | [410-429] | | | | [213-232] |
| 15 | 3843 | SGTIFDNFLITDDEEYADNF | CALR3 | 15 | 5166 | SFSQDILHDKIIDLVHLLLR | MAGE-A11 |
| | | | [309-328] | | | | [216-235] |
| 15 | 3844 | FLWQYKSSADKMQQLNAAHQ | CDCA1 | 15 | 5167 | PRKLLTQDLVQENYLEYRQV | MAGE-A12 |
| | | | [141-160] | | | | [242-261] |
| 15 | 3845 | KGLCTNSCQYQDLLSNCDSL | CRISP2 | 15 | 5168 | GSNPARYEFLWGPRALAETS | MAGE-A4 |
| | | | [198-217] | | | | [264-283] |
| 15 | 3846 | KWMLGCYDALQKKYLRMVVL | CT46 | 15 | 5169 | VVDEKYKDHFTEILNGASRR | MAGE-B1 |
| | | | [80-99] | | | | [137-156] |
| 15 | 3847 | AFLSPPTLLEGPLRLSPLLP | cTAGE5 | 15 | 5170 | TKGEMLKIVGKRFREHFPEI | MAGE-B2 |
| | | | [533-552] | | | | [133-152] |
| 15 | 3848 | RQSLQQCVAISIQQELYSPQ | CTCFL | 15 | 5171 | KMKKPIMKADMLKIVQKSHK | MAGE-B3 |
| | | | [127-146] | | | | [127-146] |
| 15 | 3849 | RAARALLSAVTRLLILADMA | CTNNA2 | 15 | 5172 | LKIISKKYKEHFPEIFRKVS | MAGE-B4 |
| | | | [125-144] | | | | [136-155] |
| 15 | 3850 | ILCALIVFWKYRRFQRNTGE | CXorf61 | 15 | 5173 | LQIPVSRSFSSTLLSIFQSS | MAGE-C1 |
| | | | [11-30] | | | | [198-217] |
| 15 | 3851 | AVSLDGYFHLWKAENTLSKL | DCAF12 | 15 | 5174 | ASSTLYLVFSPSSFSTSSSL | MAGE-C2 |
| | | | [269-288] | | | | [42-61] |
| 15 | 3852 | GGSPVKNSLRGLPGPYVPGQ | DMRT1 | 15 | 5175 | ERSQRSQIANITTVWRAQPT | MORC1 |
| | | | [249-268] | | | | [668-687] |
| 15 | 3853 | RKRKAVTKRARLQRSYEMNE | DPPA2 | 15 | 5176 | QKWREERDQLVAALEIQLKA | MPHOSPH1 |
| | | | [148-167] | | | | [1516-1535] |
| 15 | 3854 | KDTEITCSERVRTYWIIIEL | EpCAM | 15 | 5177 | ETQFNQYKTEAASRYNLTIS | MUC-1 |
| | | | [129-148] | | | | [1118-1137] |
| 15 | 3855 | TQKVTCFYQPAPYFAAEARY | FAM46D | 15 | 5178 | EKLDAFFGFQLSQEIKQQIH | NLAP4 |
| | | | [342-361] | | | | [513-532] |
| 15 | 3856 | GHASPHLFTFPPTPPKDVSP | GATA-3 | 15 | 5179 | EQLEERTWLLHDAIQNQQNA | PASD1 |
| | | | [144-163] | | | | [382-401] |
| 15 | 3857 | KEPMIVYVGTLDLVAVSSVK | HAGE | 15 | 5180 | RPRRINMTDTGISPMSTRDP | SAGE1 |
| | | | [443-462] | | | | [226-245] |
| 15 | 3858 | ALFENLRMLPHAPGVQMQAI | HDAC2 | 15 | 5181 | PIPESVIQNYNKALQQLEKY | SART3 |
| | | | [366-385]; | | | | [276-295] |
| | | | HDAC1 | | | | |
| | | | [365-384] | | | | |
| 15 | 3859 | DRVMTVSFHKYGNYFFPGTG | HDAC3 | 15 | 5182 | EELKGTEQELIGLLQAREKE | SCP-1 |
| | | | [185-204] | | | | [458-477] |
| 15 | 3860 | LYQGGQMFDGAPRFHGAVGF | IGFS11 | 15 | 5183 | EGVGVDINKALLAKRKRLEM | SCP3a |
| | | | [75-94] | | | | [75-94] |
| 15 | 3861 | TRQLCFVVRSKVNIYCSDDG | IL13RA2 | 15 | 5184 | EIEALLGMDLVRLGLERGET | SCAN1 |
| | | | [301-320] | | | | [103-122] |
| 15 | 3862 | CDVDKLHFTPRIQRLNELEA | JARID1B | 15 | 5185 | IPPRDKMEDNSALYESTSAH | se57-1 |
| | | | [76-95] | | | | [10-29] |
| 15 | 3863 | NDGTKIAASQAISAMCENSG | KU-CT-1 | 15 | 5186 | QAFPDMHNSNISKILGSAWK | SOX-6 |
| | | | [329-348] | | | | [641-660] |
| 15 | 3864 | VADLVGFLLLKYRAREPVTK | MAGE-A1 | 15 | 5187 | PGNVKALLRRATTYKHQNKL | SPAG1 |
| | | | [106-125] | | | | [273-292] |
| 15 | 3865 | GMLSDVQSMPKTGILILILS | MAGE-A10 | 15 | 5188 | QKVGSLEPRVEVLINRINEV | SYCE1 |
| | | | [213-232] | | | | [44-63] |
| 15 | 3866 | REDSVFAHPRKLLMQDLVQE | MAGE-A2 | 15 | 5189 | KVLLDAGFAVGEQSMVTDKP | TDAD1 |
| | | | [234-253] | | | | [665-684] |
| 15 | 3867 | KVLHHMVKISGGPHISYPPL | MAGE-A3 | 15 | 5190 | QAKATQFNSALFTLSSHRQG | TEX14 |
| | | | [285-304] | | | | [875-894] |
| 15 | 3868 | LHHMVKISGGPRISYPLLHE | MAGE-A6 | 15 | 5191 | SRRVEELSRPKRFYLEYYNN | THEG |
| | | | [287-306] | | | | [191-210] |
| 15 | 3869 | FLWGPRALAETSYVKVLEHV | MAGE-A8 | 15 | 5192 | KVLKSERDKIFLLYEQAQEE | TSGA10 |
| | | | [274-293]; | | | | [55-74] |
| | | | MAGE-A4 | | | | |
| | | | [272-291] | | | | |
| 15 | 3870 | LKVAELVHFLLHKYRVKEPV | MAGE-A9 | 16 | 5193 | LIFLLNFTESRTLHRNEYGI | AFP |
| | | | [110-129] | | | | [9-28] |
| 15 | 3871 | YDGILHSIYGDARKIITEDL | MAGE-B6 | 16 | 5194 | QVASDMMVSLMKTLKVHSSG | AKAP-4 |
| | | | [317-336] | | | | [339-358] |
| 15 | 3872 | KMVNVPLEQLPLLFKVVLHS | NA6A1 | 16 | 5195 | VNILTNRSNAQRQDIAFAYQ | ANXA2 |
| | | | [453-472] | | | | [57-76] |
| 15 | 3873 | TLKIIERNFPELLSLNLCNN | NXF2 | 16 | 5196 | SGKINRHEHYFNQFHRRNEL | CALR3 |
| | | | [261-280] | | | | [365-384] |
| 15 | 3874 | ACLQRKMNVDVSSTIYNNEV | NY-BR-1 | 16 | 5197 | LQQSLNQDFHQKTIVLQEGN | CDCA1 |
| | | | [1173-1192] | | | | [190-209] |
| 15 | 3875 | CKPAELSRGRGILIFSDFKD | NYD-TSPG | 16 | 5198 | PASNMLKMEWSREVTTNAQR | CRISP2 |
| | | | [211-230] | | | | [54-73] |
| 15 | 3876 | DELERKLEATSAQNIEFLQV | ODF2 | 16 | 5199 | EELERTIHSYQGQIISHEKK | cTAGE5 |
| | | | [667-686] | | | | [440-459] |
| 15 | 3877 | GPAYSILGRYQTKTMLTPGP | ODF3 | 16 | 5200 | MSLLSIQQQEGVQVVVQQPG | CTCFL |
| | | | [84-103] | | | | [97-116] |
| 15 | 3878 | RWMAQVLASELSLVAFILLL | ODF4 | 16 | 5201 | QPFEENEFIDASRLVYDGVR | CTNNA2 |
| | | | [77-96] | | | | [602-621] |
| 15 | 3879 | STYNLLFCGSCGIPVGFHLY | OIP5 | 16 | 5202 | GLINSNTDNNLAVYDLSRDI | CXorf61 |
| | | | [130-149] | | | | [47-66] |
| 15 | 3880 | CSTPTINIPASPFMQKLGFG | PBK | 16 | 5203 | LHKRKRLPPVKRSLVYYLKN | DCAF12 |
| | | | [22-41] | | | | [33-52] |
| 15 | 3881 | VTGQPSQDNCIFVVNEQTVA | PEPP2 | 16 | 5204 | TLSSHLQIDKMTDNKTGEVL | DKKL1 |
| | | | [88-107] | | | | [99-118] |
| 15 | 3882 | AWNSCNEYMPSRIIVYRDGV | PIWIL1 | 16 | 5205 | DSKSLRTALQKEITTRYQLD | EpCAM |
| | | | [685-704] | | | | [158-177] |
| 15 | 3883 | IAGPIGMRMSPPAWVELKDD | PIWIL2 | 16 | 5206 | GDQDNWLRTNWVYRGEAERI | EPHA2 |
| | | | [628-647] | | | | [75-94] |
| 15 | 3884 | KMSTYLKTISPNNFTLAFIV | PIWIL3 | 16 | 5207 | FIKRNIELAKESRNPVVMVD | FSIP1 |
| | | | [741-760] | | | | [254-273] |
| 15 | 3885 | ADCLKVFMTGALNKWYKYNH | PIWIL4 | 16 | 5208 | IQNAAVFQEAFEIVVRHAKN | Glypican- |
| | | | [663-682] | | | | 3 |
| | | | | | | | [105-124] |
| 15 | 3886 | ELFPPLFMAAFDGRHSQTLK | PRAME | 16 | 5209 | QVSLKVSNDGPTLIGANASF | gp100 |
| | | | [51-70] | | | | [65-84] |
| 15 | 3887 | VIMDWEECSKMFPKLTKNML | PASS55 | 16 | 5210 | SDEYIKFLASIRPDNMSEYS | HDAC2 |
| | | | [215-234] | | | | [70-89] |
| 15 | 3888 | FKYHLTVAQVRGGMVFELAN | PSMA | 16 | 5211 | RDYTLRTFGEMADAFKSDYF | JARID1B |
| | | | [570-589] | | | | [375-394] |
| 15 | 3889 | APECLLTDGFYTYKMDLWSA | RAGE-1 | 16 | 5212 | TSLGLTYDGMLSDVQSMPKT | MAGE-A10 |
| | | | [169-188] | | | | [205-224] |
| 15 | 3890 | GRCWIYNKTKMAFLLVGICF | SLCO6A1 | 16 | 5213 | LEHVVRVNARVRIAYPSLRE | MAGE-A4 |
| | | | [655-674] | | | | [288-307] |
| 15 | 3891 | QRKRFTAVEMARVLMERNQY | SPAG9 | 16 | 5214 | KASDSLQLVFGIELMEVDPI | MAGE-A6 |
| | | | [499-518] | | | | [153-172] |
| 15 | 3892 | DADPHGIEIMCIYKYGSMSM | SPO11 | 16 | 5215 | QENYLEYRQAPGSDPVRYEF | MAGE-A8 |
| | | | [277-296] | | | | [255-274] |
| 15 | 3893 | CSEEYLERQLQAEFIESGQY | TAF7L | 16 | 5216 | DGEEHLIYGEPRKFITQDLV | MAGE-B1 |
| | | | [362-381] | | | | [231-250] |
| 15 | 3894 | PGLSYRWLLNEFPNFIPTDG | TAG-1 | 16 | 5217 | GEPWKLITKDLVQEKYLEYK | MAGE-B2 |
| | | | [162-181] | | | | [242-261] |
| 15 | 3895 | LECAANEVNCPLQVALECLY | TEKT5 | 16 | 5218 | KVDSTKDSYVLVSKMDLPNN | MAGE-B3 |
| | | | [176-195] | | | | [170-189] |
| 15 | 3896 | VREACPHQLLTQPRKTENGA | TEX101 | 16 | 5219 | AETSKMKVLEFLAKVNDTTP | MAGE-B4 |
| | | | [205-224] | | | | [278-297] |
| 15 | 3897 | KREKNSYYVFLKYKRQVNEC | TEX15 | 16 | 5220 | DDSTATESASSSVMSPSFSS | MAGE-C1 |
| | | | [1774-1793] | | | | [1122-1141] |
| 15 | 3898 | GLFGVFLVLLDVTLILADLI | TPTE | 16 | 5221 | YTLDEKVAELVEFLLLKYEA | MAGE-C2 |
| | | | [95-114] | | | | [139-158] |
| 15 | 3899 | LQVSSYQHWIWDCLNGQALA | TSP50 | 16 | 5222 | EQEKEEIASKSALLRQIKEV | MPHOSPH1 |
| | | | [344-363] | | | | [207-226] |
| 15 | 3900 | CGVGRAAQALVCASAKEGTA | TSPY1 | 16 | 5223 | DSLVERLHRQTAEYSAFKLE | 0DF2 |
| | | | [20-39] | | | | [488-507] |
| 15 | 3901 | DINIYDLFVWMHYYVSMDAL | TYR | 16 | 5224 | EHGDSSAYENVKFIVNVRDI | PASD1 |
| | | | [169-188] | | | | [118-137] |
| 15 | 3902 | FKDCERRFSRSDQLKAHQRA | WT1 | 16 | 5225 | MDEAKILKSLHHPNIVGYRA | PBK |
| | | | [357-376] | | | | [83-102] |
| 15 | 3903 | ALSRLRELCCQWLKPEIHTK | ZNF165 | 16 | 5226 | IPTSPSHGSIAAYQGYSPQR | PEPP2 |
| | | | [66-85] | | | | [541-560] |
| 16 | 3904 | WVCDCHMADMVTWLKETEVV | 5T4 | 16 | 5227 | HDIVNRQKSIAGFVASTNAE | PIWIL3 |
| | | | [296-315] | | | | [657-676] |
| 16 | 3905 | QYPNYCSFKSQQCLMRNRNR | ACRBP | 16 | 5228 | ARLVDNIQRNTNARFELETW | PIWIL4 |
| | | | [483-502] | | | | [415-434] |
| 16 | 3906 | SGLLTGVVVDSGYGLTRVQP | ACTL8 | 16 | 5229 | SISISALQSLLQHLIGLSNL | PRAME |
| | | | [140-159] | | | | [417-436] |
| 16 | 3907 | TTGEANELLHTFLRWKTSYL | ADAM2 | 16 | 5230 | PYEEALLQAEAPRLAEYQAY | SART3 |
| | | | [239-258] | | | | [297-316] |
| 16 | 3908 | KHLPVFTYTDQGAILEDQPF | ADAM29 | 16 | 5231 | EVEKAKVIADEAVKLQKEID | SCP-1 |
| | | | [76-95] | | | | [681-700] |
| 16 | 3909 | AEDLIVSALLLIQYHLAQGG | AKAP-3 | 16 | 5232 | SGKPSVEDQFTRAYDFETED | SCP3a |
| | | | [524-543] | | | | [12-31] |
| 16 | 3910 | YCVQDTTSANTTLVHQTTPS | BRDT | 16 | 5233 | LKIKLQASREAGAAALANVA | se57-1 |
| | | | [708-727] | | | | [112-131] |
| 16 | 3911 | QLPEQIVIPFTDQVACLKEN | CABYR | 16 | 5234 | MITQLISLREQLLAAHDEQK | SOX-6 |
| | | | [311-330] | | | | [194-213] |
| 16 | 3912 | KSVSQYLEMDKTLSKKEEEV | CAGE1 | 16 | 5235 | GQGENKMKNLPVPVYLRPLD | SPAG9 |
| | | | [433-452] | | | | [660-679] |
| 16 | 3913 | QSDLQFLNFNVENSQELIQM | CCDC62 | 16 | 5236 | QGHTSSEYDMLREMFSDSRS | TAF7L |
| | | | [293-312] | | | | [311-330] |
| 16 | 3914 | SVSCITYLRGIFPECAYGTR | CT46 | 16 | 5237 | PGNISWTFSSSSLSIKWDPV | TAG-1 |
| | | | [37-56] | | | | [916-935] |
| 16 | 3915 | SLYPPTLLEGPLRLSPLLPR | CTAGE2 | 16 | 5238 | PQAKEMFIDTVISSYNIETA | TEX15 |
| | | | [503-522] | | | | [389-408] |
| 16 | 3916 | FCGDYGMIDESIYFSSDVVT | CXorf48 | 16 | 5239 | TERDVAFTDLARMTTERDSL | TSGA10 |
| | | | [46-65] | | | | [103-122] |
| 16 | 3917 | EAAAGATAVPAATVPATAAG | DBPC | 16 | 5240 | TPIEWYPDYEVEAYRRRHHN | TSPY1 |
| | | | [5-24] | | | | [233-252] |
| 16 | 3918 | CEPASEPSSFTVTPVIEEDE | DMRT1 | 17 | 5241 | EDVRVSGWLQTEFLSFQDGD | ACRBP |
| | | | [354-373] | | | | [452-471] |
| 16 | 3919 | ARAVQPKALNSCSIPVSVEA | DPPA2 | 17 | 5242 | SNTYQLPDGSRVELTPMQRV | ACTL8 |
| | | | [194-213] | | | | [235-254] |
| 16 | 3920 | PGNEEFQVVKDAVLDCLLDF | FAM46D | 17 | 5243 | LFGLEIWTNKNLIVVDDVRK | ADAM29 |
| | | | [92-111] | | | | [245-264] |
| 16 | 3921 | LLSCLSKSNNRLKSLSIQYL | FBXO39 | 17 | 5244 | KWVESIFLIFLLNFTESRTL | AFP |
| | | | [115-134] | | | | [2-21] |
| 16 | 3922 | RRKAKGRNRRSHRAMRVAHL | FMR1NB | 17 | 5245 | LGNGSSVDEVSFYANRLTNL | AKAP-3 |
| | | | [5-24] | | | | [115-134] |
| 16 | 3923 | GDPQLCHFLESHYLHEQVKT | FTHL17 | 17 | 5246 | SSGKPIPASVVLKRVLLRHT | AKAP-4 |
| | | | [126-145] | | | | [356-375] |
| 16 | 3924 | EISGDEFLNFLLKLNKQCGH | GASZ | 17 | 5247 | KIRSEFKAKYGKSLYYYIQQ | ANXA2 |
| | | | [350-369] | | | | [302-321] |
| 16 | 3925 | ANGDPVCNACGLYYKLHNIN | GATA-3 | 17 | 5248 | PDSQQQYNVVKTVKVTEQLR | BRDT |
| | | | [333-352] | | | | [255-274] |
| 16 | 3926 | TLCYLMPGFIHLVLQPSLKG | HAGE | 17 | 5249 | AQLEENAKYSSVYMEAEATA | CABYR |
| | | | [293-312] | | | | [366-385] |
| 16 | 3927 | CWTYETSLLVEEAISEELPY | HDAC3 | 17 | 5250 | KMKNTDYLTQYDLSEFENIG | CALR3 |
| | | | [306-325] | | | | [279-298] |
| 16 | 3928 | SESPGSIQVARGQPAVLPCT | IGFS11 | 17 | 5251 | ARNETLSNTLVELSAQVGQL | CCDC62 |
| | | | [26-45] | | | | [133-152] |
| 16 | 3929 | ESSCEIKLKWSIPLGPIPAR | IL13RA2 | 17 | 5252 | SEQDELMADISKRIQSLEDE | cTAGE5 |
| | | | [249-268] | | | | [160-179] |
| 16 | 3930 | TEEIPLKILAHNNFVGRLIG | KOC1 | 17 | 5253 | EHQLGNNTLSSHLQIDKMTD | DKKL1 |
| | | | [274-293] | | | | [92-111] |
| 16 | 3931 | PDVKKNSMECIYNLVQDFQC | KU-CT-1 | 17 | 5254 | QQLGLSTNGKKIEVYLRLHR | DPPA2 |
| | | | [164-183] | | | | [105-124] |
| 16 | 3932 | NSQCKITIVGTGAVGMACAI | LDHC | 17 | 5255 | HKAREKPYDSKSLRTALQKE | EpCAM |
| | | | [18-37] | | | | [150-169] |
| 16 | 3933 | KLQEVKILAQFYNDFVNISS | LIPI | 17 | 5256 | EQQKKIESYLHNHFIGEGMT | FAM46D |
| | | | [401-420] | | | | [275-294] |
| 16 | 3934 | LESVIKNYKHCFPEIFGKAS | MAGE-A1 | 17 | 5257 | GPLSVYPPASSSSLSGGHAS | GATA-3 |
| | | | [129-148] | | | | [128-147] |
| 16 | 3935 | WVQEKYLVYRQVPGTDPACY | MAGE-A11 | 17 | 5258 | SLIYRRRLMKQDFSVPQLPH | gp100 |
| | | | [363-382] | | | | [613-632] |
| 16 | 3936 | IGHLYILVTCLGLSYDGLLG | MAGE-A12 | 17 | 5259 | QLSTGGSVASAVKLNKQQTD | HDAC1 |
| | | | [172-191] | | | | [111-130] |
| 16 | 3937 | ISHLYILVTCLGLSYDGLLG | MAGE-A2 | 17 | 5260 | HNLLLNYGLYRKMEIYRPHK | HDAC2 |
| | | | [172-191] | | | | [40-59] |
| 16 | 3938 | LGDNQIMPKAGLLIIVLAII | MAGE-A3 | 17 | 5261 | IREDDTTLVTATVENETYTL | IL13RA2 |
| | | | [190-209] | | | | [276-295] |
| 16 | 3939 | GTDVKEVDPAGHSYILVTAL | MAGE-A9 | 17 | 5262 | QEGPSTFPDLETSFQVALSR | MAGE-A12 |
| | | | [162-181] | | | | [92-111] |
| 16 | 3940 | CATEEEVWEFLGLLGIYDGI | MAGE-B6 | 17 | 5263 | EEGPRMFPDLESEFQAAISR | MAGE-A2 |
| | | | [301-320] | | | | [92-111] |
| 16 | 3941 | AGALEDFPARWSFRAYTSVL | MORC1 | 17 | 5264 | VGNWQYFFPVIFSKASSSLQ | MAGE-A3 |
| | | | [225-244] | | | | [140-159] |
| 16 | 3942 | KNYGQLDIFPARDTYHPMSE | MUC-1 | 17 | 5265 | EEGVEAQEEALGLVGAQAPT | MAGE-A4 |
| | | | [1189-1208] | | | | [13-32] |
| 16 | 3943 | TPQTQHQLKALCSLAAEGMW | NLRP4 | 17 | 5266 | PAHLESLFREALDEKVAELV | MAGE-A8 |
| | | | [389-408] | | | | [101-120 |
| 16 | 3944 | MCLPEIRYIAGKMVNVPLEQ | NA6A1 | 17 | 5267 | YKMREPIMKADMLKVVDEKY | MAGE-B1 |
| | | | [442-461] | | | | [123-142] |
| 16 | 3945 | RNWFKVTIPYGIKYDKAWLM | NXF2 | 17 | 5268 | KSGSLVQFLLYKYKIKKSVT | MAGE-B2 |
| | | | [122-141] | | | | [114-133] |
| 16 | 3946 | IQDAQKRTALHWACVNGHEE | NY-BR-1 | 17 | 5269 | VDVSYKKSYKGANSKIEKKQ | MAGE-B3 |
| | | | [12-31] | | | | [75-94] |
| 16 | 3947 | KPLTIYVYQEGLVRFATEKF | NYD-TSPG | 17 | 5270 | SASQKAIIFKRLSKDAVKKK | MAGE-B6 |
| | | | [266-285] | | | | [179-198] |
| 16 | 3948 | TWRPHRPRGPIMALYSSPGP | ODF3 | 17 | 5271 | STFEGFAQSSLQIPVSPSFS | MAGE-C1 |
| | | | [9-28] | | | | [258-277] |
| 16 | 3949 | RSCSDLENGKVTFIFSTLML | ODF4 | 17 | 5272 | KLREILLYFFPEHQLPSELE | MORC1 |
| | | | [142-161] | | | | [824-843] |
| 16 | 3950 | GHFCLSSDKMVCYLLKTKAI | OIP5 | 17 | 5273 | QQHVPFRESKLTHYFQSFFN | MPHOSPH1 |
| | | | [160-179] | | | | [426-445] |
| 16 | 3951 | KMGGELWRVDIPLKLVMIVG | PIWIL1 | 17 | 5274 | QLKVLIAENTMLTSKLKEKQ | NY-BR-1 |
| | | | [611-630] | | | | [1111-1130] |
| 16 | 3952 | DSLKLCLVGSLKKFYEVNHC | PIWIL2 | 17 | 5275 | ITPPSSEKLVSVMRLSDLST | ODF2 |
| | | | [786-805] | | | | [91-110] |
| 16 | 3953 | SLVNYNLWIEKVTQLEGRPF | PRSS55 | 17 | 5276 | SMEWDTQVVKGSSPLGPAGL | OIP5 |
| | | | [287-306] | | | | [36-55] |
| 16 | 3954 | LHETDSAVATARRPRWLCAG | PSMA | 17 | 5277 | GPPDPQAFQGPAAYQPDQMR | PASD1 |
| | | | [5-24] | | | | [735-754] |
| 16 | 3955 | PQCLSLLHAMVAYDPDERIA | RAGE-1 | 17 | 5278 | GTGVNVYLMKRSPRGLSHSP | PBK |
| | | | [256-275] | | | | [41-60] |
| 16 | 3956 | PAPGNILSTAPPWLRHMAAA | SAGE1 | 17 | 5279 | DVMHLSQSPSVSQLSVLSLS | PRAME |
| | | | [639-658] | | | | [338-357] |
| 16 | 3957 | WGAEMGANEHGVCIANEAIN | SCRN1 | 17 | 5280 | IGEGTFSEVMKMQSLRDGNY | RAGE-1 |
| | | | [77-96] | | | | [10-29] |
| 16 | 3958 | FLFAAVVAWCTLIPLSCFPN | SLCO6A1 | 17 | 5281 | RKQDNVLSNVLSGLINMAGA | SAGE1 |
| | | | [318-337] | | | | [451-470] |
| 16 | 3959 | YPSLWGFGTTKTFKIPIEHL | SPAG1 | 17 | 5282 | TEKENKMKDLTFLLEESRDK | SCP-1 |
| | | | [6-25] | | | | [276-295] |
| 16 | 3960 | TVVDNIINDISCMLKVSRRS | SPO11 | 17 | 5283 | EYSQQFLTLFQQWDLDMQKA | SCP3a |
| | | | [148-167] | | | | [124-143] |
| 16 | 3961 | LKGERPGAAHQAGPDVLIGQ | SYCE1 | 17 | 5284 | VAFPPRAKDGLVVFGKNSAR | SCRN1 |
| | | | [312-331] | | | | [11-30] |
| 16 | 3962 | QPITSSHLALPFQIIRCSLE | TDRD1 | 17 | 5285 | IQDIITSLARNEAPAFTIDN | SPO11 |
| | | | [1039-1058] | | | | [55-74] |
| 16 | 3963 | EKCMGMRKTFPCTPRLVGHT | TEKT5 | 17 | 5286 | GQDTSSQKIEDLMEMVQKLQ | SYCE1 |
| | | | [466-485] | | | | [25-44] |
| 16 | 3964 | IGCRLMSGILAVGPMFVREA | TEX101 | 17 | 5287 | DRGSETTYESSADIAGDEGT | TAF7L |
| | | | [189-208] | | | | [36-55] |
| 16 | 3965 | PLPTQLYNWAAPEVILQKAA | TEX14 | 17 | 5288 | LMELNGSSSQLIIMLLKNFM | TDRD1 |
| | | | [414-433] | | | | [1060-1079] |
| 16 | 3966 | LCWPSVYWTERFLEDTTLTI | THEG | 17 | 5289 | SNAAIQIASATMPALSLNND | TEX15 |
| | | | [166-185] | | | | [598-617] |
| 16 | 3967 | NLPPRRILFIKHFIIYSIPR | TPTE | 17 | 5290 | NEGYDRRPLASMSLPPPKAS | THEG |
| | | | [407-426] | | | | [349-368] |
| 16 | 3968 | DQMTQTASDVPVLQVIMHSR | TSP50 | 17 | 5291 | SSGRQSFYRNPIKEVVRFLD | TPTE |
| | | | [172-191] | | | | [253-272] |
| 16 | 3969 | NLLSPASFFSSWQIVCSRLE | TYR | 17 | 5292 | ELVRHHNMHQRNMTKLQLAL | WT1 |
| | | | [261-280] | | | | [430-449] |
| 16 | 3970 | KRPFMCAYPGCNKRYFKLSH | WT1 | 17 | 5293 | SQSSNLSQHQRIHMRENLLM | ZNF165 |
| | | | [320-339] | | | | [466-485] |
| 16 | 3971 | GTCDQSFKWNSDFINHQIIY | ZNF165 | 18 | 5294 | PWPERLSNNVEELLQSSLSL | ACRBP |
| | | | [295-314] | | | | [167-186] |
| 17 | 3972 | TGNQLAVLPAGAFARRPPLA | 5T4 | 18 | 5295 | LAKDLIVSALKLIQYHLTQQ | AKAP-4 |
| | | | [99-118] | | | | [540-559] |
| 17 | 3973 | GSDTTVVAQKVFQLIGLTNA | ADAM2 | 18 | 5296 | LEKDIISDTSGDFRKLMVAL | ANXA2 |
| | | | [195-214] | | | | [155-174] |
| 17 | 3974 | RQFETVCKFHWVEAFDDEMT | CAGE1 | 18 | 5297 | DKSKLWLLKDRDLARQKEQE | BRDT |
| | | | [119-138] | | | | [900-919] |
| 17 | 3975 | SEKTKRLNELKLSVVSLKEI | CDCA1 | 18 | 5298 | KVSSIHSDQSDVLMVDVATS | CABYR |
| | | | [217-236] | | | | [182-201] |
| 17 | 3976 | SDPTSWSSAIQSWYDEILDF | CRISP2 | 18 | 5299 | QERTNSELHNLRQIYVKQQS | CCDC62 |
| | | | [102-121] | | | | [275-294] |
| 17 | 3977 | FEGEPMYLNVGEVSTPFHIF | CT46 | 18 | 5300 | AQLQRTPMSALVFPNKISTE | CT46 |
| | | | [203-222] | | | | [4-23] |
| 17 | 3978 | PGPPRAPFAMRNVYLPRGFL | CTAGE2 | 18 | 5301 | ELYQENEMKLHRKLTVEENY | cTAGE5 |
| | | | [710-729] | | | | [387-406] |
| 17 | 3979 | KTFRTVTLLRNHVNTHTGTR | CTCFL | 18 | 5302 | GPLKNTSDVINAAKKIAEAG | CTNNA2 |
| | | | [292-311] | | | | [733-752] |
| 17 | 3980 | AGAIRGRAARVIHIINAEME | CTNNA2 | 18 | 5303 | RLFLKGNLLRGIDSLFSAPM | DKKL1 |
| | | | [540-559] | | | | [57-76] |
| 17 | 3981 | PSAPGSRTPGNPATAVSGTP | DBPC | 18 | 5304 | VRTYWIIIELKHKAREKPYD | EpCAM |
| | | | [58-77] | | | | [139-158] |
| 17 | 3982 | NVCLAYGSEWSVYAVGSQAH | DCAF12 | 18 | 5305 | VLPDGQVIWVNNTIINGSQV | gp100 |
| | | | [299-318] | | | | [96-115] |
| 17 | 3983 | SFYQPSLFPYYNNLYNCPQY | DMRT1 | 18 | 5306 | PARRAKRMRAEAMNIKIEPE | JARID1B |
| | | | [212-231] | | | | [227-246] |
| 17 | 3984 | MELQAARACFALLWGCALAA | EPHA2 | 18 | 5307 | LENFTLKVAYIPDEMAAQQN | KOC1 |
| | | | [1-20] | | | | [144-163] |
| 17 | 3985 | RILLQEIPIRSISLRSCYFS | FBXO39 | 18 | 5308 | AAEADGIDPLINLLSSKRDG | KU-CT-1 |
| | | | [300-319] | | | | [394-413] |
| 17 | 3986 | SLEEDSALEALLNFFFPTTC | FMR1NB | 18 | 5309 | WKNIHKQVIQSAYEIIKLKG | LDHC |
| | | | [115-134] | | | | [227-246] |
| 17 | 3987 | AENMKCLQFSKDVIISDTKD | FSIP1 | 18 | 5310 | VKNTRKVAVSLSVHIKNLLK | LIPI |
| | | | [501-520] | | | | [147-166] |
| 17 | 3988 | AINSHITLELYTSYLYLSMA | FTHL17 | 18 | 5311 | KVLEYVIKVSARVRFFFPSL | MAGE-A1 |
| | | | [20-39] | | | | [278-297] |
| 17 | 3989 | LLDSGISVDSNFQYGWTPLM | GASZ | 18 | 5312 | ASEEEIWEELGVMGVYDGRE | MAGE-A4 |
| | | | [65-84] | | | | [217-236] |
| 17 | 3990 | RTACLVVAMLLSLDFPGQAQ | Glypican- | 18 | 5313 | VGNWQYFFPVIFSKASDSLQ | MAGE-A6 |
| | | | 3 | | | | [140-159] |
| | | | [6-25] | | | | |
| 17 | 3991 | VHDVTHVYNFDFPRNIEEYV | HAGE | 18 | 5314 | VNPNGHTYTFIDKVDLTDEE | MAGE-B2 |
| | | | [553-572] | | | | [171-190] |
| 17 | 3992 | NNKICDIAINWAGGLHHAKK | HDAC3 | 18 | 5315 | EFLNKMRIYDGKKHFIFGEP | MAGE-B3 |
| | | | [119-138] | | | | [225-244] |
| 17 | 3993 | NIGLIAGAIGTGAVIIIFCI | IGFS11 | 18 | 5316 | GEPRKLITQDLVQEKYLEYQ | MAGE-B4 |
| | | | [239-258] | | | | [239-258] |
| 17 | 3994 | CAVNTFLTENSPYSLLEVLC | JARID1B | 18 | 5317 | RTSQHLVVAFGVELKEMDSS | MAGE-B6 |
| | | | [1072-1091] | | | | [239-258] |
| 17 | 3995 | LIPGLNLNALGLFPPTSGMP | KOC1 | 18 | 5318 | LDEKVDELARFLLLKYQVKQ | MAGE-C1 |
| | | | [364-383] | | | | [908-927] |
| 17 | 3996 | PEEEVVIHEFASLCLANMSA | KU-CT-1 | 18 | 5319 | AFTKLNNASSRSHSIFTVKI | MPHOSPH1 |
| | | | [119-138] | | | | [340-359] |
| 17 | 3997 | YSPDCKILVVSNPVDILTYI | LDHC | 18 | 5320 | PSPGSTLSSSRSVELNGFMA | NR6A1 |
| | | | [127-146] | | | | [190-209] |
| 17 | 3998 | NKRPCLEFSQLSVKDSFRDL | LIPI | 18 | 5321 | YLKGELLRRTKRDIVDSLSA | NXF2 |
| | | | [38-57] | | | | [454-473] |
| 17 | 3999 | PVTKAEMLESVIKNYKHCFP | MAGE-A1 | 18 | 5322 | IDIHFLERKMQHHLLKEKNE | NY-BR-1 |
| | | | [122-141] | | | | [1296-1315] |
| 17 | 4000 | SDPARYEFLWGPRAHAEIRK | MAGE-A10 | 18 | 5323 | EKSEEYAEQLHVQLADKDLY | ODF2 |
| | | | [289-308] | | | | [414-433] |
| 17 | 4001 | LVHLLLRKYRVKGLITKAEM | MAGE-A11 | 18 | 5324 | QPDQMRSAEQTRLMPAEQRD | PASD1 |
| | | | [229-248] | | | | [749-768] |
| 17 | 4002 | MPKTGFLIIILAIIAKEGDC | MAGE-A6 | 18 | 5325 | SNSIKRNPNAPVVRRGWLYK | PEPP2 |
| | | | [196-215] | | | | [159-178] |
| 17 | 4003 | GLSCDSMLGDGHSMPKAALL | MAGE-A9 | 18 | 5326 | QETAQLVGSTASQQPGYIQP | PIWIL1 |
| | | | [182-201] | | | | [16-35] |
| 17 | 4004 | RNGLLMPLLSVIFLNGNCAR | MAGE-B4 | 18 | 5327 | MSGRARVKARGIARSPSATE | PIWIL4 |
| | | | [197-216] | | | | [1-20] |
| 17 | 4005 | VTEAEMLMIVIKYKDYFPVI | MAGE-C2 | 18 | 5328 | RRLWGSIQSRYISMSVWTSP | PRAME |
| | | | [162-181] | | | | [4-23] |
| 17 | 4006 | SPGSGSSTTQGQDVTLAPAT | MUC-1 | 18 | 5329 | RPFYRHVIYAPSSHNKYAGE | PSMA |
| | | | [65-84] | | | | [684-703] |
| 17 | 4007 | EYISEMLLRNKSVRYLDLSA | NLRP4 | 18 | 5330 | GSMKVKRQFVEFTIKEAARF | SAGE1 |
| | | | [797-816] | | | | [854-873] |
| 17 | 4008 | RKQRNRCQYCRLLKCLQMGM | NR6A1 | 18 | 5331 | QENRKIIEAQRKAIQELQFG | SCP-1 |
| | | | [106-125] | | | | [135-154] |
| 17 | 4009 | NLCNNKLYQLDGLSDITEKA | NXF2 | 18 | 5332 | MFRQQQKILQQSRIVQSQRL | SCP3a |
| | | | [276-295] | | | | [153-172] |
| 17 | 4010 | QFIPLTFVMPNDYTKFVAEY | NYD-TSPG | 18 | 5333 | PLKNVRKKRFRKTQKKVPDV | TAF7L |
| | | | [176-195] | | | | [225-244] |
| 17 | 4011 | MTEEVWMGTWRPHRPRGPIM | ODF3 | 18 | 5334 | KLVENSLSISNPGLFTSLGP | TDRD1 |
| | | | [1-20] | | | | [144-163] |
| 17 | 4012 | IFSTLMLFPINIWIFELERN | ODF4 | 18 | 5335 | GEYFYSSTAQENLALETSSP | TEX14 |
| | | | [155-174] | | | | [1088-1107] |
| 17 | 4013 | KKERPISMINEASNYNVTSD | PEPP2 | 18 | 5336 | LKKAHRRVHTSLQLITKVGE | TEX15 |
| | | | [114-133] | | | | [1004-1023] |
| 17 | 4014 | PLISVKPLDNWLLIYTRRNY | PIWIL1 | 18 | 5337 | RKRRRRRRLMELAEPKINWQ | THEG |
| | | | [486-505] | | | | [120-139] |
| 17 | 4015 | ERINLKNTSFITSQELNWVK | PIWIL2 | 18 | 5338 | TTDKILIDVFDGLPLYDDVK | TPTE |
| | | | [571-590] | | | | [458-477] |
| 17 | 4016 | PGIIRVPAPCHYAHKLAYLV | PIWIL3 | 18 | 5339 | FWSWVGQANDIGLLKLKQEL | TSP50 |
| | | | [844-863] | | | | [197-216] |
| 17 | 4017 | NDNSEAQLAHLIPELCFLTG | PIWIL4 | 18 | 5340 | ASPLTGIADASQSSMHNALH | TYR |
| | | | [365-384] | | | | [348-367] |
| 17 | 4018 | EPGEKWYQVGIISWGKSCGE | PRSS55 | 18 | 5341 | ENSRSMPKLEIFEKIESQRI | ZNF165 |
| | | | [259-278] | | | | [188-207] |
| 17 | 4019 | GAKGVILYSDPADYFAPGVK | PSMA | 19 | 5342 | GFTKRLFRELMGDHVSSTKA | ACTL8 |
| | | | [221-240] | | | | [306-325] |
| 17 | 4020 | LSSVGLHMTKGLALWEAYRE | SART3 | 19 | 5343 | QITEEQLEAVIADFSGLLEK | AFP |
| | | | [214-233] | | | | [562-581] |
| 17 | 4021 | ENKLLQLKSSATYGKSCQDL | se57-1 | 19 | 5344 | AQDKAESYSLISMKGMGDPK | AKAP-3 |
| | | | [213-232] | | | | [397-416] |
| 17 | 4022 | LVAIFIAFYGDRKKVIWFVA | SLCO6A1 | 19 | 5345 | LSGEAAEAVHSGTSVKSSSG | CABYR |
| | | | [157-176] | | | | [451-470] |
| 17 | 4023 | VAEARVYRDARGRASSEPHI | SOX-6 | 19 | 5346 | PVQEDMALNEVLQKLKHTNR | CAGE1 |
| | | | [602-621] | | | | [298-317] |
| 17 | 4024 | ADGNVKAFYRRALAHKGLKN | SPAG1 | 19 | 5347 | TILSPKQIKTPFQKILRDKD | CT46 |
| | | | [687-706] | | | | [239-258] |
| 17 | 4025 | DSTLRLYHAHTYQHLQDVDI | SPAG9 | 19 | 5348 | VAEAKMTFKRFQANEERLEI | CTAGE2 |
| | | | [1109-1128] | | | | [157-176] |
| 17 | 4026 | TATRRKPHLLLVAAVALVSS | TAG-1 | 19 | 5349 | AAPIHDADAQESSLGLTGLQ | DKKL1 |
| | | | [3-22] | | | | [30-49] |
| 17 | 4027 | NSWRPSLFYKIANVQTCPDE | TEKT5 | 19 | 5350 | ASGALVGAASGSSAGGSSRG | DMRT1 |
| | | | [48-67] | | | | [34-53] |
| 17 | 4028 | KTENGATCLPIPVWGLQLLL | TEX101 | 19 | 5351 | TRNDWRVASELINILERANQ | HAGE |
| | | | [219-238] | | | | [592-611] |
| 17 | 4029 | GQPSLCSFEINEIYSGCLIL | TEX14 | 19 | 5352 | LPEIQELYQTLLAKPSPAQQ | JARID1B |
| | | | [619-638] | | | | [1360-1379] |
| 17 | 4030 | SCKSPKSTTAHAILRRVETE | TSGA10 | 19 | 5353 | SDLESIFKDAKIPVSGPFLV | KOC1 |
| | | | [85-104] | | | | [16-35] |
| 17 | 4031 | KVDPYRSCGFSYEQDPTLRD | TSP50 | 19 | 5354 | SSKRDGAIANAATVLTNMAM | KU-CT-1 |
| | | | [97-116] | | | | [408-427] |
| 17 | 4032 | FSDHNFAGSNKIAEILCKDL | TSPY1 | 19 | 5355 | DLQHGSLFFSTSKITSGKDY | LDHC |
| | | | [261-280] | | | | [64-83] |
| 17 | 4033 | VGAVLTALLAGLVSLLCRHK | TYR | 19 | 5356 | DMNVIVVDWSRGATTFIYNR | LIPI |
| | | | [484-503] | | | | [126-145] |
| 18 | 4034 | LALIGAIFLLVLYLNRKGIK | 5T4 | 19 | 5357 | WVQENYLEYRQVPGSNPARY | MAGE-A4 |
| | | | [363-382] | | | | [251-270] |
| 18 | 4035 | ISLRPLLVSHVMACGGNTLY | ACTL8 | 19 | 5358 | SVMGLYDGREHSVYWKLRKL | MAGE-A8 |
| | | | [285-304] | | | | [229-248] |
| 18 | 4036 | IFCVLIAIMVKVNFQRKKWR | ADAM2 | 19 | 5359 | NLSNDWDFPRNGLLMPLLGV | MAGE-B1 |
| | | | [698-717] | | | | [188-207] |
| 18 | 4037 | FGGQKHIIHIKVKKLLFSKH | ADAM29 | 19 | 5360 | RGQTQDHQGAQITATNKKKV | MAGE-B3 |
| | | | [58-77] | | | | [19-83] |
| 18 | 4038 | QHACAVMKNFGTRTFQAITV | AFP | 19 | 5361 | RTHSTFEGFPQSLLQIPMTS | MAGE-C1 |
| | | | [221-240] | | | | [325-344] |
| 18 | 4039 | EVVSDLIDSFLRNLHSVTGT | AKAP-3 | 19 | 5362 | KQEFLNVQEYNHLLKVMGQY | MORC1 |
| | | | [328-347] | | | | [414-433] |
| 18 | 4040 | KLDKYHSLNEELDFLVTSYE | CAGE1 | 19 | 5363 | VQQIQSNYDIAIAELHVQKS | MPHOSPH1 |
| | | | [690-709] | | | | [933-952] |
| 18 | 4041 | CGFDIKKVHVILHFKNKYHE | CALR3 | 19 | 5364 | TMNKRYNVSQQALDLQNLRF | NXF2 |
| | | | [137-156] | | | | [220-239] |
| 18 | 4042 | PFSNLVTHLDSFLPICRVND | CDCA1 | 19 | 5365 | YWRTSSFRMTEHNSVKPWQQ | NYD-TSPG |
| | | | [84-103] | | | | [124-143] |
| 18 | 4043 | RAAVAGFFAVLFLWRSFRSV | CTAGE2 | 19 | 5366 | NRSLGQRQNSPLPFQWRITH | ODF4 |
| | | | [17-36] | | | | [55-74] |
| 18 | 4044 | CCQCSYASRDTYKLKAHMRT | CTCFL | 19 | 5367 | RSWTYGITRGGRVFFINEEA | PEPP2 |
| | | | [372-391] | | | | [14-33] |
| 18 | 4045 | WCPPPFFYRRRFVRGPRPPN | DBPC | 19 | 5368 | KVLRSETVLDFMFNFYHQTE | PIWIL1 |
| | | | [223-242] | | | | [272-291] |
| 18 | 4046 | GTLNKVFASQWLNHRQVVCG | DCAF12 | 19 | 5369 | FKRANMDNDIALLLLASPIK | PRSS55 |
| | | | [87-106] | | | | [148-167] |
| 18 | 4047 | PQGRAGGFGKASGALVGAAS | DMRT1 | 19 | 5370 | RLQDFDKSNPIVLRMENDQL | PSMA |
| | | | [24-43] | | | | [649-668] |
| 18 | 4048 | ALNSCSIPVSVEAFLMQASG | DPPA2 | 19 | 5371 | KMENVQPAPDNVLLTLRPRR | SAGE1 |
| | | | [201-220] | | | | [210-229] |
| 18 | 4049 | LEPHMNYTFTVEARNGVSGL | EPHA2 | 19 | 5372 | AATEAPKMSNADFAKLFLRK | SART3 |
| | | | [402-421] | | | | [944-963] |
| 18 | 4050 | EIRFTNLTWDQVITLDQVLD | FAM46D | 19 | 5373 | GGSGAVMSERVSGLAGSIYR | SPAG9 |
| | | | [3-22] | | | | [14-33] |
| 18 | 4051 | EVKFMNPYNAVLTKKFQVTM | FBXO39 | 19 | 5374 | NEVKALLRSDAEAVSTRWEV | TAF7L |
| | | | [93-112] | | | | [263-282] |
| 18 | 4052 | FKCFAPFRDVPKQMMQMFGL | FMR1NB | 19 | 5375 | NESVAPYTPFEVKIRSYNAR | TAG-1 |
| | | | [171-190] | | | | [775-794] |
| 18 | 4053 | SEECEASKGYYLTKALTGHN | FSIP1 | 19 | 5376 | FQAENTIMLLERSIMAKEGP | TEKT5 |
| | | | [473-492] | | | | [368-387] |
| 18 | 4054 | SHYLHEQVKTIKELGGYVSN | FTHL17 | 19 | 5377 | AYDPKHFHNRVVRIMIDDHN | TPTE |
| | | | [136-155] | | | | [289-308] |
| 18 | 4055 | ANASFEKDKQSILITACSAH | GASZ | 19 | 5378 | LVERREEAQRAQQAVPGPGP | TSPY1 |
| | | | [103-122] | | | | [83-102] |
| 18 | 4056 | PTHHGSQVCRPPLLHGSLPW | GATA-3 | 19 | 5379 | AQYRIHTHGVFRGIQDVARV | WT1 |
| | | | [77-96] | | | | [284-303] |
| 18 | 4057 | PDATCHQVRSFFQRLQPGLK | Glypican- | 20 | 5380 | GRRDARSFVEAAGTTNFPAN | AKAP-3 |
| | | | 3 | | | | [543-562] |
| | | | [31-50] | | | | |
| 18 | 4058 | QSQAWPIVLQGIDLIGVAQT | HAGE | 20 | 5381 | SKIASEMAYEAVELTAAEMR | AKAP-4 |
| | | | [269-288] | | | | [268-287] |
| 18 | 4059 | HSDDYIKFLRSIRPDNMSEY | HDAC1 | 20 | 5382 | MKGKGTRDKVLIRIMVSRSE | ANXA2 |
| | | | [68-87] | | | | [278-297] |
| 18 | 4060 | YGQGHPMKPHRIRMTHNLLL | HDAC2 | 20 | 5383 | SATEKVFKQQEIPSVFPKTS | BRDT |
| | | | [25-44] | | | | [166-185] |
| 18 | 4061 | LHHAKKFEASGFCYVNDIVI | HDAC3 | 20 | 5384 | IKIGSEKSLHLEVEITSIVS | CABYR |
| | | | [133-152] | | | | [409-428] |
| 18 | 4062 | TFTTSAALINLNVIWMVTPL | IGFS11 | 20 | 5385 | ERPEIVSTWSSAGISWRSEA | CAGE1 |
| | | | [45-64] | | | | [260-279] |
| 18 | 4063 | GFILILVIFVTGLLLRKPNT | IL13RA2 | 20 | 5386 | HKEKDKGLQTTQNGRFYAIS | CALR3 |
| | | | [349-368] | | | | [59-78] |
| 18 | 4064 | VQFLLFKYQMKEPITKAEIL | MAGE-A10 | 20 | 5387 | NQKSLFKDQKFEAMLVQQNR | CCDC62 |
| | | | [142-161] | | | | [348-367] |
| 18 | 4065 | FREASVCMQLLFGIDVKEVD | MAGE-A11 | 20 | 5388 | KTRSGKVFQNKMANGNQPVK | CT46 |
| | | | [264-283] | | | | [333-352] |
| 18 | 4066 | LETSFQVALSRKMAELVHFL | MAGE-A12 | 20 | 5389 | IEEKSKLLEKFSLVQKEYEG | cTAGE5 |
| | | | [101-120] | | | | [86-105] |
| 18 | 4067 | VIFSKASEYLQLVFGIEVVE | MAGE-A2 | 20 | 5390 | GSSRGGGSGSGASDLGAGSK | DMrT1 |
| | | | [149-168] | | | | [49-68] |
| 18 | 4068 | MPKAGLLIIVLAIIAREGDC | MAGE-A3 | 20 | 5391 | NSYNVRRTEGFSVTLDDLAP | EPHA2 |
| | | | [196-215] | | | | [480-499] |
| 18 | 4069 | GHSYILVTCLGLSYDGLLGD | MAGE-A8 | 20 | 5392 | RPSRVHASEVESAVWYVKKF | FBXO39 |
| | | | [176-195] | | | | [66-85] |
| 18 | 4070 | SMPKAALLIIVLGVILTKDN | MAGE-A9 | 20 | 5393 | QLAEIDIKLQELSAASPTIS | FSIP1 |
| | | | [194-213] | | | | [319-338] |
| 18 | 4071 | DPPRYQFLWGPRAYAETTKM | MAGE-B1 | 20 | 5394 | GSHHTASPWNLSPFSKTSIH | GATA-3 |
| | | | [264-283] | | | | [104-123] |
| 18 | 4072 | WEVLNAVGVYAGREHFVYGE | MAGE-C2 | 20 | 5395 | FVNLKNITYLVLDEADKMLD | HAGE |
| | | | [250-269] | | | | [384-403] |
| 18 | 4073 | AMGIPFIIQCDLCLKWRVLP | MORC1 | 20 | 5396 | GSVAGAVKLNRQQTDMAVNW | HDAC2 |
| | | | [477-496] | | | | [117-136] |
| 18 | 4074 | TLVHNGTSARATTTPASKST | MUC-1 | 20 | 5397 | TESVSHFSDLGQSFSFHSGN | IGFS11 |
| | | | [971-990] | | | | [332-351] |
| 18 | 4075 | QEANFHIIDNVDLVVSAYCL | NLAP4 | 20 | 5398 | TVEYELKYRNIGSETWKTII | IL13RA2 |
| | | | [574-593] | | | | [66-85] |
| 18 | 4076 | LKPWLLEVNYSPALTLDCST | NYD-TSPG | 20 | 5399 | HSVPKRQRIRKLQIRNIPPH | KOC1 |
| | | | [380-399] | | | | [72-91] |
| 18 | 4077 | TPGPAAYRQTDVRVTKFKAP | ODF3 | 20 | 5400 | FHPGGLMKLASREADLYRFI | KU-CT-1 |
| | | | [179-198] | | | | [853-872] |
| 18 | 4078 | SELSLVAFILLLVVAFSKKW | ODF4 | 20 | 5401 | RAHAETSKMKVLEYIANANG | MAGE-A11 |
| | | | [85-104] | | | | [389-408] |
| 18 | 4079 | GPQLPSWLQPERCAVFQCAQ | OIP5 | 20 | 5402 | EEGPSTFPDLESEFQAALSR | MAGE-A6 |
| | | | [63-82] | | | | [92-111] |
| 18 | 4080 | HHPNIVGYRAFTEANDGSLC | PBK | 20 | 5403 | QIKEPVTKAEMLESVIKNYK | MAGE-A8 |
| | | | [93-112] | | | | [128-147] |
| 18 | 4081 | PNVECKSMRFGMLKDHQAVT | PIWIL2 | 20 | 5404 | KEPVTKAEMLESVIKNYKRY | MAGE-A9 |
| | | | [249-268] | | | | [126-145] |
| 18 | 4082 | LQLWDLKFDTNFLSVPGRVL | PIWIL3 | 20 | 5405 | DGEEHSVFGEPWKLITKDLV | MAGE-B2 |
| | | | [453-472] | | | | [234-253] |
| 18 | 4083 | MLLFSVLLLLSLVTGTQLGP | PRSS55 | 20 | 5406 | STSTERSLKDSLTRKTKMLV | MAGE-B4 |
| | | | [1-20] | | | | [98-117] |
| 18 | 4084 | GDFGSCRSVYSKQPYTEYIS | RAGE-1 | 20 | 5407 | QATIDTADDATVMASESLSV | MAGE-C2 |
| | | | [144-163] | | | | [345-364] |
| 18 | 4085 | VYDYNCHVDLIALLRLEGEL | SART3 | 20 | 5408 | LDVQIQHVVEGKRALSELTQ | MPHOSPH1 |
| | | | [109-128] | | | | [1135-1154] |
| 18 | 4086 | MAAAPPSYCFVAFPPRAKDG | SCRN1 | 20 | 5409 | ESLDQKLFQLQSKNMWLQQQ | NY-BR-1 |
| | | | [1-20] | | | | [1261-1280] |
| 18 | 4087 | SCQDLQREISILQEQISHLQ | se57-1 | 20 | 5410 | HKAEVEAIMEQLKELKQKGD | ODF2 |
| | | | [228-247] | | | | [377-396] |
| 18 | 4088 | NPVLICLALSKATEYLVIIG | SLCO6A1 | 20 | 5411 | TKYVFDSAPSHSISARTKAF | ODF3 |
| | | | [382-401] | | | | [112-131] |
| 18 | 4089 | RRQEMRQFFTVGQQPQIPIT | SOX-6 | 20 | 5412 | SVHLAWDLSRSLGAVVFSRV | OIP5 |
| | | | [717-736] | | | | [90-109] |
| 18 | 4090 | VDYKTVLQIDCGLQLANDSV | SPAG1 | 20 | 5413 | NDLIEERYKASQDPFPAAII | PBK |
| | | | [542-561] | | | | [124-143] |
| 18 | 4091 | LKDSILSIVHVKGIVLVALA | SPAG9 | 20 | 5414 | RGTTEIGMIGSKPFSTVKYK | PEPP2 |
| | | | [999-1018] | | | | [779-798] |
| 18 | 4092 | HILSTSKGLIAGNLRYIEED | SPO11 | 20 | 5415 | KRVNTRFFAQSGGRLQNPLP | PIWIL1 |
| | | | [169-188] | | | | [742-761] |
| 18 | 4093 | VLWSKGTEILVNSSRVTVTP | TAG-1 | 20 | 5416 | KTPKDSFTMSDGKEITFLEY | PIWIL2 |
| | | | [450-469] | | | | [436-455] |
| 18 | 4094 | LPTLRSALFSRYSPHDWDQS | TEKT5 | 20 | 5417 | PSVSQLSVLSLSGVMLTDVS | PRAME |
| | | | [78-97] | | | | [346-365] |
| 18 | 4095 | HCPTCVALGTCFSAPSLPCP | TEX101 | 20 | 5418 | YSEELFPEELSVVLGTNDLT | PRSS55 |
| | | | [139-158] | | | | [111-130] |
| 18 | 4096 | TEALIVCEQDVSRMRRQLDE | TSGA10 | 20 | 5419 | KFSGYPLYHSVYETYELVEK | PSMA |
| | | | [316-335] | | | | [545-564] |
| 18 | 4097 | MRPEGSLTYAVPERLRQGFC | TSPY1 | 20 | 5420 | RLNPHPNILMLHEVVFDRKS | RAGE-1 |
| | | | [1-20] | | | | [56-75] |
| 18 | 4098 | PPPPSQASSGQARMFPNAPY | WT1 | 20 | 5421 | ELTKVRMARQKMSEIFPLTE | SART3 |
| | | | [114-133] | | | | [127-146] |
| 19 | 4099 | VPTDLPAYVRNLFLTGNQLA | 5T4 | 20 | 5422 | ELEDIKVSLQRSVSTQKALE | SCP-1 |
| | | | [85-104] | | | | [323-342] |
| 19 | 4100 | IYDENSYWRNQNPGSLLQLP | ACRBP | 20 | 5423 | TGEGEFNFSEVFSPVEDHLD | SCRN1 |
| | | | [301-320] | | | | [215-234] |
| 19 | 4101 | IPRATIIYANISGHLCIAVE | ADAM2 | 20 | 5424 | SILQEQISHLQFVIHSQHQN | se57-1 |
| | | | [557-576] | | | | [237-256] |
| 19 | 4102 | NCSYGDFWEYTVERTKCLLE | ADAM29 | 20 | 5425 | QQQEQIARQQQQLLQQQHKI | SOX-6 |
| | | | [368-387] | | | | [232-251] |
| 19 | 4103 | FNQWKQNATDIMEAMLKRLV | AKAP-4 | 20 | 5426 | IIEAKMELEEVTRLLNLKDK | SPAG1 |
| | | | [412-431] | | | | [724-743] |
| 19 | 4104 | HLETVILGLLKTPAQYDASE | ANXA2 | 20 | 5427 | SSSLSIKWDPVVPFRNESAV | TAG-1 |
| | | | [94-113] | | | | [925-944] |
| 19 | 4105 | EKMDNQEYKDAYKFAADVRL | BRDT | 20 | 5428 | QAIIQGFSYDLLKKIDSPQR | TEX14 |
| | | | [324-343] | | | | [152-171] |
| 19 | 4106 | YHENKKLIRCKVDGFTHLYT | CALR3 | 20 | 5429 | HVSDHNRLLHLARPKAQSDK | THEG |
| | | | [154-173] | | | | [293-312] |
| 19 | 4107 | MVAVHQQQLLSWEEDRQKVL | CCDC62 | 20 | 5430 | TVEKEMKSLARKAMDTESEL | TSGA10 |
| | | | [47-66] | | | | [174-193] |
| 19 | 4108 | EKMKDTVQKLKNARQEVVEK | CDCA1 | 20 | 5431 | SAKEGTAFRMEAVQEGAAGV | TSPY1 |
| | | | [256-275] | | | | [33-52] |
| 19 | 4109 | RGPLFPVDARGPFLRRGPPF | cTAGE5 | | | | |
| | | | [700-719] | | | | |

### Example 19—Process for Personalized Vaccination

[0426] Process for personalized vaccination consists of 3 main steps as shown in FIG. 17. First, during the visit at the oncologist the patient provides saliva sample and tumor sample (biopsy) for tumor pathology. Second step is the matching of vaccine peptides with the patient's unique genetic code: Based on the determined HLA genotype of the patient and determined tumor type of the patient, 12 tumor and patient specific peptides are selected for the patient from the Hotspot Sequences listed in Table-25. Then, the vaccine will be prepared and after fill&finish plus QC release, and vaccine vials shipped to the clinical site. At the clinic, as third step of the process, vaccine is administered to the patient by the oncologist. The manufacturing of the personalized vaccine is carried out under GMP conditions. Vaccine selection and preparation can be performed during 6-8 weeks.

Eligibility criteria for personalized vaccination are:
[0427] ≥12 immunogenic peptides (12 PEPIs) from
[0428] ≥12 different cancer-specific antigens (expression rate (ER) in the disease ≥10%) and
[0429] AGP ≥3 (expected number of antigens expressed in the patient's tumor)
[0430] On stock in the PEPI PANEL “Warehouse”

### Example 20—Feasibility Study for a “Simulated” Breast Cancer Clinical Trial

[0431] We describe here a model, where the peptide set (“warehouse”) consists of 100 immunogenic peptides derived from breast cancer specific TSAs (FIG. 18). These 100 peptides represent the peptide set for vaccine selection in this example. In this stock, there are available 100 mg of each peptide, that represents 25 peptide dose (for vaccination).

[0432] During the feasibility study, we screened 509 HLA-genotyped breast cancer subjects and identified 82 patients (16%) who were not eligible because less, than 12 peptides were found for those patients. This means, that 82% of patients could be treated with “patient-specific” vaccine from a panel consisting of 100 peptides. However, the amount (100 mg each) will only be enough for 32% of the patients if we intend to administer 3 doses/patient during the treatment, therefore 267 (52%), who will have not sufficient peptides in warehouse must be also excluded from this feasibility study. Consequently, 160 patients can be enrolled and treated by the administration of 3 consecutive vaccine doses. Manufacturing (GMP) can be performed within cca. 6 months.

### Example 21—Vaccine Selection for a Breast Cancer Patient (Patient-C of Example 22) and for a Colorectal Cancer Patient (Patient-D of Example 22)

[0433] The vaccine selection process from peptides listed in Table 25 is demonstrated here by two examples.

[0434] Patient-C's PIT vaccine described in Example 22 were designed during a completely personalized design process and manufactured individually, and demonstrated very high immunogenicity: 11 out of 12 (92%) vaccine peptides induced CD8+ T cell responses and 11/12 (92%) were resulted in CD4+ T cell specific immune responses.

By taking the HLA genotype and tumor pathology report (breast cancer) of Patient-C, patient matching process according to Example 16 resulted in 116 of 3286 sequences, selected from 38 breast cancer specific TSAs (according to selection criteria of, Expression rate (ER) ≥10%). These 116 peptides are usable for vaccine selection for Patient-C and contain the PIT vaccine sequences. Three examples for random selection of 12 peptides from the 116 peptides are shown in Table 25 with expected AGP numbers.

[0435] PIT vaccine of Patient-C has an expected AGP value of 6.45, meaning that at least 6 vaccine-specific TSAs are likely expressed in the patient's tumor and are targeted by immune responses with at least 50% of probability. (AGP95 is 4, meaning that PIT vaccine peptides from at least 4 different TSAs are likely expressed in the patient's tumor and are targeted by immune responses in Patient-C with at least 95% probability.)

TABLE 29
Vaccine selection for Patient-C from the PEPI PANEL. Original vaccine means the
PIT vaccine designed during in a completely personalized design process for Patient-C (Example
22). The peptide set matched with Patient-C breast cancer indication resulted in 116 of 3286
Sequences selected from 38 of 58 Breast cancer specific TSAs). These 116 peptides are usable
for vaccine selection for Patient-C. Three examples for random selection of 12 peptides from the
116 peptides are shown in this table with calculated expected AGP numbers.

| | | Calculated | |
|---|---|---|---|
| | | expected | |
| Vaccines | SEQ ID NOS (AG[ER %] from Table 25) | AGP | CI95% |
| PIT vaccine | 5449 (SPAG9[88%]), 5432 (AKAP-4[85%]), 5433 (CTCFL[74%]), | 6.45 | [3, 9] |
| of Patient-C | 5440 (MAGE-A11[59%]), 41 (FMR1NB[55%]), 5437 (FSIP1[42%]), | | |
| | 5444 (NY-BR-1[47%]), 5439 (LDHC[35%]), 5438 (GATA-3[31%]), | | |
| | 440 (Survivin[68%]), 5443 (MAGE-C1[16%]), 111 (PRAME[49%]) | | |
| Random1 | 2 (ACRBP[40%]), 7 (AKAP-3[40%]), 18 (CDCA1[64%]), 40 | 4.91 | [2, 8] |
| | (FBXO39[38%]), 41 (FMR1NB[55%]), 42 (FSIP1[42%]), 57 | | |
| | (JARID1B[76%]), 60 (Lage-1[12%]), 66 (MAGE-A11[59%]), 68 | | |
| | (MAGE-A2[12%]), 74 (MAGE-A9[44%]), 80 (MAGE-C1[16%]) | | |
| Random2 | 107 (PIWIL2[94%]), 167 (AKAP-4[85%]), 183 (CTCFL[74%]), 192 | 7.96 | [5.11] |
| | (EpCAM[76%]), 215 (JARID1B[76%]), 405 (ODF4[63%]), 440 | | |
| | (Survivin[68%]), 663 (MAGE-A11[59%]), 1539 (MAGE-A9[44%]), | | |
| | 857 (TDRD1[38%]), 1326 (PEPP2[60%]), 1441 (ODF4[63%]) | | |
| Random3 | 18 (CDCA1[64%]), 107 (PIWIL2[94%]), 215 (JARID1B[76%]), | 5.92 | [3, 9] |
| | 297 (TDRD1[38%]), 391 (MAGE-C1[16%]), 470 (AKAP-4[85%]), | | |
| | 490 (DKKL1[20%]), 498 (FBXO39[38%]), 1088 (PRAME[49%]), | | |
| | 1100 (SP17[47%]), 1800 (TSGA10[70%]) | | |

[0436] For Patient-D, a similar analysis was performed. During the patient matching process according to Example 19, 136 of 3286 sequences were selected from Table 25. (derived from 37 of 53 CRC specific TSAs), based on the HLA genotype and tumor pathology report (colorectal cancer, CRC) data of Patient-D. These 136 peptides are usable for vaccine selection for Patient-D. Three examples for random selection of 13 peptides from the 136 peptides are shown in Table 30, with calculated AGP numbers. Patient-D had a PIT vaccine consisting of 13 peptides, therefore the random selection was also performed to result in 13 peptide sets.

[0437] Patient-D's PIT vaccine described in Example 22 were designed during a completely personalized design process and manufactured individually, and demonstrated very high immunogenicity: 13 out of 13 (100%) vaccine peptides induced CD8+ T cell responses and 7/13 (54%) were resulted in CD4+ T cell specific immune responses.

[0438] PIT vaccine of Patient-D has an expected AGP value of 6.60, meaning that at least 6 vaccine-specific TSAs are likely expressed in the patient's tumor and are targeted by immune responses with at least 50% of probability. (AGP95 is 4, meaning that PIT vaccine peptides from at least 4 different TSAs are likely expressed in the patient's tumor and are targeted by immune responses in Patient-D with at least 95% probability.)

TABLE 30
Vaccine selection for Patient-D from the PEPI PANEL. Original vaccine means the
PIT vaccine designed during in a completely personalized design process for Patient-D (Example
22). The peptide set matched with Patient-D CRC indication resulted in 136 of 3286 Sequences
selected from 37 of 53 CRC specific TSAs). These 136 peptides are usable for vaccine selection
for Patient-D and contain the PIT vaccine sequences. Three examples for random selection of 13
peptides from the 116 peptides are shown in this table with calculated AGP numbers.

| | | Calculated | |
|---|---|---|---|
| | | expected | |
| Vaccines | SEQ ID NOS (AG[ER %] from Table 25) | AGP | CI95% |
| PIT vaccine | 5450 (TSP50[89%]), 5436 (EpCAM[88%]), 5434 (CAGE1[74%]), | 6.60 | [4, 10] |
| of Patient-D | 5447 (PIWIL1[48%]), 5448 (SPAG9[71%]), 2168 (AKAP-4 | | |
| | [74%]), 5442 (MAGE-A8[44%]), 5435 (DPPA2[44%]), 40 | | |
| | (FBXO39[39%]), 5445 (NYD-TSPG[30%]), 5446 (PAGE4[33%]), | | |
| | 647 (HAGE[15%]), 1172 (Lage-1[13%]) | 5.30 | [2, 8] |
| Random1 | 315 (5T4[85%]), 347 (DPPA2[44%]), 353 (FBXO39[39%]), 371 | | |
| | (Lage-1[13%]), 383 (MAGE-A6[22%]), 384 (MAGE-A8[44%]), | | |
| | 412 (PIWIL2[80%]), 470 (AKAP-4[74%]), 486 (CXorf48[17%]), | | |
| | 639 (FBXO39[39%]), 647 (HAGE[15%]), 652 (IGFS11[55%]), | 6.91 | [4, 10] |
| | 657 (Lage-1[13%]) | | |
| Random2 | 1157 (FBXO39[39%]), 1160 (GASZ[22%]), 1172 (Lage-1[13%]), | | |
| | 1183 (MAGE-A6[22%]), 1211 (PIWIL3[96%]), 1249 (5T4[85%]), | | |
| | 1256 (AKAP-4[74%]), 1262 (CCDC62[13%]), 1270 | 5.32 | [3, 8] |
| | (DBPC[90%]), 1274 (EpCAM[88%]), 1300 (MAGE-A3[22%]), | | |
| | 1365 (ZNF165[43%]), 1372 (AKAP-3[83%]) | | |
| Random3 | 470 (AKAP-4[74%]), 486 (CXorf48[17%]), 639 (FBXO39[39%]), | | |
| | 647 (HAGE[15%]), 652 (IGFS11[55%]), 657 (Lage-1[13%]), 658 | | |
| | (LDHC[15%]), 686 (NYD-TSPG[30%]), 696 (PIWIL3[96%]), 713 | | |
| | (SPAG1[55%]), 796 (MAGE-A1[14%]), 830 (PIWIL3[96%]), 929 | | |
| | (MAGE-A2[18%]) | | |

### Example 22—Personalised Immunotherapy (PIT) Design and Treatment for Ovarian-, Breast- and Colorectal Cancer

[0439] This Example provides proof of concept data from 4 metastatic cancer patients treated with personalized immunotherapy vaccine compositions to support the principals of binding of epitopes by multiple HLAs of a subject to induce cytotoxic T cell responses, on which the present disclosure is partly based on.

Composition for Treatment of Ovarian Cancer with POC01-PIT (Patient-A)

[0440] This example describes the treatment of an ovarian cancer patient with a personalised immunotherapy composition, wherein the composition was specifically designed for the patient based on her HLA genotype based on the disclosure described herein.

[0441] The HLA class I and class II genotype of a metastatic ovarian adenocarcinoma cancer patient (Patient-A) was determined from a saliva sample.

[0442] To make a personalized pharmaceutical composition for Patient-A thirteen peptides were selected, each of which met the following two criteria: (i) derived from an antigen that is expressed in ovarian cancers, as reported in peer reviewed scientific publications; and (ii) comprises a fragment that is a T cell epitope capable of binding to at least three HLA class I of Patient-A (Table 31). In addition, each peptide is optimized to bind the maximum number of HLA class II of the patient.

TABLE 31
Personalized vaccine of ovarian cancer Patient-A.

| POC01 | | Anti- | | | | |
|---|---|---|---|---|---|---|
| vaccine | Tar- | gen | | | MAX | MAX |
| for | get | Ex- | | SEQ | HLA | HLA |
| Patient- | Anti- | pres- | | ID | class | class |
| A | gen | sion | 20mer peptides | NO: | I | II |
| POC01_ | AKAP4 | 89% | NSLQKQLQAVLQWIA | 5933 | 3 | 5 |
| P1 | | | ASQFN | | | |
| POC01_ | BORIS | 82% | SGDERSDEIVLTVSN | 5934 | 4 | 2 |
| P2 | | | SNVEE | | | |
| POC01_ | SPAG9 | 76% | VQKEDGRVQAFGWSL | 5935 | 3 | 3 |
| P3 | | | PQKYK | | | |
| POC01_ | OY- | 75% | EVESTPMIMENIQEL | 5936 | 3 | 4 |
| P4 | TES-1 | | IRSAQ | | | |
| POC01_ | SP17 | 69% | AYFESLLEKREKTNF | 5937 | 3 | 1 |
| P5 | | | DPAEW | | | |
| POC01_ | WT1 | 63% | PSQASSGQARMFPNA | 5938 | 4 | 1 |
| P6 | | | PYLPS | | | |
| POC01_ | HIWI | 63% | RRSIAGFVASINEGM | 5939 | 3 | 4 |
| P7 | | | TRWFS | | | |
| POC01_ | PRAME | 60% | MQDIKMILKMVQLDS | 5940 | 3 | 4 |
| P8 | | | IEDLE | | | |
| POC01_ | AKAP- | 58% | ANSVVSDMMVSIMKT | 5941 | 3 | 4 |
| P9 | 3 | | LKIQV | | | |
| POC01_ | MAGE- | 37% | REALSNKVDELAHFL | 5942 | 3 | 2 |
| P10 | A4 | | LRKYR | | | |
| POC01_ | MAGE- | 37% | ETSYEKVINYLVMLN | 5943 | 3 | 4 |
| P11 | A9 | | AREPI | | | |
| POC01_ | MAGE- | 52% | DVKEVDPTGHSFVLV | 5944 | 3 | 4 |
| P12a | A10 | | TSLGL | | | |
| POC01_ | BAGE | 30% | SAQLLQARLMKEESP | 5945 | 3 | 2 |
| P12b | | | VVSWR | | | |

[0443] Eleven PEPI3 peptides in this immunotherapy composition can induce T cell responses in Patient-A with 84% probability and the two PEPI4 peptides (POC01-P2 and POC01-P5) with 98% probability, according to the validation of the PEPI test shown in Table 7. T cell responses target 13 antigens expressed in ovarian cancers. Expression of these cancer antigens in Patient-A was not tested. Instead the probability of successful killing of cancer cells was determined based on the probability of antigen expression in the patient's cancer cells and the positive predictive value of the ≥1 PEPI3+ test (AGP count). AGP count predicts the effectiveness of a vaccine in a subject: Number of vaccine antigens expressed in the patient's tumor (ovarian adenocarcinoma) with PEPI. The AGP count indicates the number of tumor antigens that the vaccine recognizes and induces a T cell response against the patient's tumor (hit the target). The AGP count depends on the vaccine-antigen expression rate in the subject's tumor and the HLA genotype of the subject. The correct value is between 0 (no PEPI presented by any expressed antigen) and maximum number of antigens (all antigens are expressed and present a PEPI).

[0444] The probability that Patient-A will express one or more of the 13 antigens is shown in FIGS. 19A-B. AGP95 (AGP with 95% probability)=5, AGP50 (the mean-expected value-of the discrete probability distribution)=7.9, mAGP (probability that AGP is at least 2)=100%, AP=13.

[0445] A pharmaceutical composition for Patient-A may be comprised of at least 2 from the 13 peptides (Table 31), because the presence in a vaccine or immunotherapy composition of at least two polypeptide fragments (epitopes) that can bind to at least three HLAs of an individual (≥2 PEPI3+) was determined to be predictive for a clinical response. The peptides are synthetized, dissolved in a pharmaceutically acceptable solvent and mixed with an adjuvant prior to injection. It is desirable for the patient to receive personalized immunotherapy with at least two peptide vaccines, but preferable more to increase the probability of killing cancer cells and decrease the chance of relapse.

[0446] For treatment of Patient-A, the 13 peptides were formulated as 4×3 or 4 peptide (P0001/1, P0001/2, P0001/3, P0001/4). One treatment cycle is defined as administration of all 13 peptides within 30 days.

### Patient History:

[0447] Diagnosis: Metastatic ovarian adenocarcinoma

### Age: 51

[0448] Family anamnesis: colon and ovary cancer (mother) breast cancer (grandmother)

### Tumor Pathology:

[0449] 2011: first diagnosis of ovarian adenocarcinoma; Wertheim operation and chemotherapy; lymph node removal
2015: metastasis in pericardial adipose tissue, excised
2016: hepatic metastases
2017: retroperitoneal and mesenteric lymph nodes have progressed; incipient peritoneal carcinosis with small accompanying ascites

### Prior Therapy:

### 2012: Paclitaxel-carboplatin (6×)

### 2014: Caelyx-carboplatin (lx)

[0450] 2016-2017 (9 months): Lymparza (Olaparib) 2×400 mg/day, oral
2017: Hycamtin inf. 5×2.5 mg (3× one seria/month)

[0451] PIT vaccine treatment began on 21 Apr. 2017. FIG. 20.

2017-2018: Patient-A received 8 cycles of vaccination as add-on therapy, and lived 17 months (528 days) after start of the treatment. During this interval, after the 3^{rd} and 4^{th} vaccine treatment she experienced partial response as best response. She died in October 2018.

[0452] An interferon (IFN)-γ ELISPOT bioassay confirmed the predicted T cell responses of Patient-A to the 13 peptides. Positive T cell responses (defined as >5 fold above control, or >3 fold above control and >50 spots) were detected for all 13 20-mer peptides and all 13 9-mer peptides having the sequence of the PEPI of each peptide capable of binding to the maximum HLA class I alleles of Patient-A (FIG. 21).

Patient' tumor MRI findings (Baseline Apr. 15, 2016) (BL: baseline for tumor response evaluation on FIG. 22)
Disease was confined primarily to liver and lymph nodes. The use of MRI limits detection of lung (pulmonary) metastasis
May 2016-January 2017: Olaparib treatment (FU1: follow up 1 on FIG. 22)
Dec. 25, 2016 (before PIT vaccine treatment) There was dramatic reduction in tumor burden with confirmation of response obtained at (FU2: follow up 2 on FIG. 22)
January-March 2017—TOPO protocol (topoisomerase)
Apr. 6, 2017 (FU3 on FIG. 22) demonstrated regrowth of existing lesions and appearance of new lesions leading to disease progression. Peritoneal carcinomatosis with increased amount of ascites. Progressive hepatic tumor and lymph node

### Apr. 21, 2017 Start Pit

[0453] Jul. 26, 2017 (after the 2^{nd} Cycle of PIT): (FU4 on FIG. 22) Progression/Pseudo-Progression
[0454] Rapid progression in lymph nodes, hepatic, retroperitoneal and thoracic areas, significant pleural fluid and ascites. Initiate Carboplatin, Gemcitabine, Avastin.
   Sep. 20, 2017 (after 3 Cycles of PIT): (FU5 on FIG. 22) Partial Response
[0455] Complete remission in the pleural region/fluid and ascites
[0456] Remission in hepatic, retroperitoneal area and lymph nodes
[0457] The findings suggest pseudo progression.
   Nov. 28, 2017 (after 4 Cycles of PIT): (FU6 on FIG. 22) Partial Response
[0458] Complete remission in the thoracic region. Remission in hepatic, retroperitoneal area and lymph nodes

### Apr. 13, 2018: Progression

[0459] Complete remission in the thoracic and retroperitoneal regions. Progression in hepatic centers and lymph nodes
   Jun. 12, 2018: Stable disease
[0460] Complete remission in the thoracic and retroperitoneal regions. Minimal regression in hepatic centers and lymph nodes

### July 2018: Progression

[0461] October 2018: Patient-A died
Partial MRI data for Patient-A is shown in Table 32 and FIG. 22.

TABLE 32
Summary Table of Lesions Responses

| | Baseline | FU1 | FU2 | FU3 | FU4 | FU5 | FU6 | | |
|---|---|---|---|---|---|---|---|---|---|
| Lesion/ | (% Δ | (% Δ | (% Δ | (% Δ | (% Δ | (% Δ | (% Δ | Best | PD |
| Time | from | from | from | from | from | from | from | Response | Time |
| Point | BL) | BL) | BL) | BL) | BL) | BL) | BL) | Cycle | Point |
| TL1 | NA | −56.1 | −44.4 | −44.8 | +109.3 | −47.8 | −67.3 | FU6 | FU4 |
| TL2 | NA | −100.0 | −100.0 | −47.1 | −13.1 | −100.0 | −100.0 | FU1 | FU3 |
| TL3 | NA | −59.4 | −62.3 | −62.0 | −30.9 | −66.7 | −75.9 | FU6 | FU4 |
| TL4 | NA | −65.8 | −100.0 | −100.0 | −100.0 | −100.0 | −100.0 | FU2 | NA |
| SUM | NA | −66.3 | −76.0 | −68.9 | −23.5 | −78.2 | −85.2 | FU6 | FU4 |

### Design, Safety and Immunogenicity of Personalised Immunotherapy Composition PBRC01 for Treatment of Metastatic Breast Cancer (Patient-B)

[0462] The HLA class I and class II genotype of metastatic breast cancer Patient-B was determined from a saliva sample. To make a personalized pharmaceutical composition for Patient-B twelve peptides were selected, each of which met the following two criteria: (i) derived from an antigen that is expressed in breast cancers, as reported in peer reviewed scientific publications; and (ii) comprises a fragment that is a T cell epitope capable of binding to at least three HLA class I of Patient-B (Table 33). In addition, each peptide is optimized to bind the maximum number of HLA class II of the patient. The twelve peptides target twelve breast cancer antigens. The probability that Patient-B will express one or more of the 12 antigens is shown in FIGS. 23A-C.

TABLE 33
12 peptides for Patient-B breast cancer patient

| | | Anti- | | | | |
|---|---|---|---|---|---|---|
| | Tar- | gen | | | MAXHL | MAXHL |
| BRC01 | get | Ex- | | SEQ | A | A |
| vaccine | Anti- | pres- | | ID | Class | Class |
| peptides | gen | sion | 20mer peptide | NO: | I | II |
| PBRC01_ | FSIP1 | 49% | ISDTKDYFMSKTL | 5946 | 3 | 6 |
| cP1 | | | GIGRLKR | | | |
| PBRC01_ | SPAG9 | 88% | FDRNTESLFEELS | 5947 | 3 | 2 |
| cP2 | | | SAGSGLI | | | |
| PBRC01_ | AKAP4 | 85% | SQKMDMSNIVLML | 5948 | 3 | 6 |
| cP3 | | | IQKLLNE | | | |
| PBRC01_ | BORIS | 71% | SAVFHERYALIQH | 5949 | 3 | 6 |
| cP4 | | | QKTHKNE | | | |
| PBRC01_ | MAGE- | 59% | DVKEVDPTSHSYV | 5950 | 3 | 4 |
| cP5 | A11 | | LVTSLNL | | | |
| PBRC01_ | NY- | 49% | ENAHGQSLEEDSA | 5951 | 3 | 2 |
| cP6 | SAR- | | LEALLNF | | | |
| | 35 | | | | | |
| PBRC01_ | HOM- | 47% | MASFRKLTLSEKV | 5952 | 3 | 5 |
| cP7 | TES- | | PPNHPSR | | | |
| | 85 | | | | | |
| PBRC01_ | NY- | 47% | KRASQYSGQLKVL | 5953 | 3 | 6 |
| cP8 | BR-1 | | IAENTML | | | |
| PBRC01_ | MAGE- | 44% | VDPAQLEFMFQEA | 5954 | 3 | 8 |
| cP9 | A9 | | LKLKVAE | | | |
| PBRC01_ | SCP- | 38% | EYEREETRQVYMD | 5955 | 3 | 3 |
| cP10 | 1 | | LNNNIEK | | | |
| PBRC01_ | MAGE- | 37% | PEIFGKASESLQL | 5956 | 3 | 3 |
| cP11 | A1 | | VFGIDVK | | | |
| PBRC01_ | MAGE- | 21% | DSESSFTYTLDEK | 5957 | 4 | 2 |
| cP12 | C2 | | VAELVEF | | | |

[0463] Predicted Efficacy:

[0464] AGP95=4; 95% likelihood that the PIT Vaccine induces CTL responses against 4 TSAs expressed in the breast cancer cells of Patient-B. Additional efficacy parameters: AGP50=6.45, mAGP=100%, AP=12.

[0465] For treatment of Patient-B the 12 peptides were formulated as 4×3 peptide (PBR01/1, PBR01/2, PBR01/3, PBR01/4). One treatment cycle is defined as administration of all 12 different peptide vaccines within 30 days (FIG. 23C).

### Patient History:

[0466] 2013: Diagnosis: breast carcinoma diagnosis; CT scan and hone scan ruled out metastatic disease.
2014: bilateral mastectomy, postoperative chemotherapy
2016: extensive metastatic disease with nodal involvement both above and below the diaphragm. Multiple liver and pulmonary metastases.

### Therapy:

### 2013-2014: Adriamycin-Cyclophosphamide and Paclitaxel

[0467] 2017: Letrozole, Palbociclib and Gosorelin and PIT vaccine
2018: Worsening conditions, patient died in January

[0468] PIT vaccine treatment began on 7 Apr. 2017. treatment schedule of Patient-B and main characteristics of disease are shown in Table 34.

TABLE 34
Treatment and response of Patient-B

| | Date (2017) | | | | | |
|---|---|---|---|---|---|---|
| | March | May | June | September | November | December |
| | PIT Vaccine | | | | | |
| | Palbocyclib | | | | | |
| Treatment | Letrozole | | | | | |
| regimen | Gosorelin | Anticancer drug treatment interruption | | | | |
| Neutrophils | ND | 1.1 | 4.5 | 3.4 | 2.4 | 3 |
| (1.7-3.5/mm³) | | | | | | |
| CEA | 99 | 65 | 23 | 32 | 128 | 430 |
| (<5.0 ng/ml) | | | | | | |
| CA 15-3 | 322 | 333 | 138 | 76 | 272 | 230 |
| (<31.3 U/ml) | | | | | | |
| T1: Right | 15 mm & | 9 mm & | nd* | nd | nd | 6 mm & 0 |
| axillar | 11.6 | 2.0 | | | | SUVₘₐₓ |
| lymph node | SUVₘₐₓ | SUVₘₐₓ | | | | |
| T2: Right lung | 10 mm & | 7 mm & 0 | nd | nd | nd | 4 mm & 0 |
| metastasis | 4.8 | SUVₘₐₓ | | | | SUVₘₐₓ |
| | SUVₘₐₓ | | | | | |
| Left iliac | Non | Regression | nd | nd | nd | Regression |
| bone | measurable | & 0 | | | | & |
| metastasis | & 4.0 | SUVₘₐₓ | | | | 0 SUVₘₐₓ |
| | SUVₘₐₓ | | | | | |
| Multiple liver | Non | Partial | nd | nd | nd | Progression |
| metastases | measurable | regression | | | | & 16.8 |
| | & 11.5 | & 6.1 | | | | SUVₘₐₓ |
| | SUVₘₐₓ | SUVₘₐₓ | | | | |

*no data

[0469] It was predicted with 95% confidence that 8-12 vaccine peptides would induce T cell responses in Patient-B. Peptide-specific T cell responses were measured in all available PBMC samples using an interferon (IFN)-γ ELISPOT bioassay (FIG. 24). The results confirmed the prediction: Nine peptides reacted positive demonstrating that T cells can recognize Patient-B's tumor cells expressing FISP1, BORIS, MAGE-A11, HOM-TES-85, NY-BR-1, MAGE-A9, SCP1, MAGE-A1 and MAGE-C2 antigens. Some tumor specific T cells were present after the 1^{St} vaccination and boosted with additional treatments (e.g. MAGE-A1) others induced after boosting (e.g. MAGE-A9). Such broad tumor specific T cell responses are remarkable in a late stage cancer patient.

### Patient-B History and Results

[0470] Mar. 7, 2017: Prior PIT Vaccine treatment
Hepatic multi-metastatic disease with truly extrinsic compression of the origin of the choledochal duct and massive dilatation of the entire intrahepatic biliary tract. Celiac, hepatic hilar and retroperitoneal adenopathy
March 2017: Treatment initiation—Letrozole, Palbociclib, Gosorelin & PIT Vaccine
May 2017: Drug interruption
May 26, 2017: After 1 cycle of PIT
83% reduction of tumor metabolic activity (PET CT) liver, lung lymphnodes and other metastases.
June 2017: Normalized Neutrophils values indicate Palbociclib interruption as affirmed by the patient

### 4 Months Delayed Rebound of Tumor Markers

[0471] March to May 2017: CEA and CA remained elevated consistently with the outcome of her anti-cancer treatment (Ban, Future Oncol 2018)
June to September 2017: CEA and CA decreased consistently with the delayed responses to immunotherapies

### Quality of Life

[0472] February to March 2017: Poor, hospitalized with jaundice

### April to October 2017: Excellent

[0473] November 2017: Worsening conditions (tumor escape?)
January 2018: Patient-B died.
Immunogenicity results are summarized in FIG. 24.

[0474] Clinical outcome measurements of the patient: One month prior to the initiation of PIT vaccine treatment PET CT documented extensive DFG avid disease with nodal involvement both above and below the diaphragm (Table 34). She had progressive multiple hepatic, multifocal osseous and pulmonary metastases and retroperitoneal adenopathy. Her intrahepatic enzymes were elevated consistent with the damage caused by her liver metastases with elevated bilirubin and jaundice. She accepted Letrozole, Palbociclib and Gosorelin as anti-cancer treatment. Two month after initiation of PIT vaccinations the patient felt very well and her quality of life normalized. In fact, her PET CT showed a significant morphometabolic regression in the liver, lung, bone and lymph node metastases. No metabolic adenopathy was identifiable at the supra-diaphragmatic stage.

[0475] The combination of Palblocyclib and the personalised vaccine was likely to have been responsible for the remarkable early response observed following administration of the vaccine. Palbocyclib has been shown to improve the activity of immunotherapies by increasing TSA presentation by HLAs and decreasing the proliferation of Tregs (Goel et al. Nature. 2017:471-475). The results of Patient-B treatment suggest that PIT vaccine may be used as add-on to the state-of-art therapy to obtain maximal efficacy.

[0476] Patient-B's tumor biomarkers were followed to disentangle the effects of state-of-art therapy from those of PIT vaccine. Tumor markers were unchanged during the initial 2-3 months of treatment then sharply dropped suggesting of a delayed effect, typical of immunotherapies (Table 34). Moreover, at the time the tumor biomarkers dropped the patient had already voluntarily interrupted treatment and confirmed by the increase in neutrophil counts.

[0477] After the 5^{th} PIT treatment the patient experienced symptoms. The levels of tumor markers and liver enzymes were increased again. 33 days after the last PIT vaccination, her PET CT showed significant metabolic progression in the liver, peritoneal, skeletal and left adrenal site confirming the laboratory findings. The discrete relapse in the distant metastases could be due to potential immune resistance; perhaps caused by downregulation of both HLA expression that impairs the recognition of the tumor by PIT induced T cells. However, the PET CT had detected complete regression of the metabolic activity of all axillary and mediastinal axillary supra-diaphragmatic targets (Table 34). These localized tumor responses may be accounted to the known delayed and durable responses to immunotherapy, as it is unlikely that after anti-cancer drug treatment interruption these tumor sites would not relapse.

Personalised Immunotherapy Composition for Treatment of a Patient with Metastatic Breast Carcinoma (Patient-C)

[0478] PIT vaccine similar in design to that described for Patient-A and Patient-B was prepared for the treatment of a patient (Patient-C) with metastatic breast carcinoma. PIT vaccine contained 12 PEPIs. The PIT vaccine has a predicted efficacy of AGP=4. The patient's treatment schedule is shown in FIG. 25.

### Tumor Pathology

[0479] 2011 Original tumor: HER2-, ER+, sentinel lymph node negative
2017 Multiple bone metastases: ER+, cytokeratin 7+, cytokeratin 20-,CA125-, TTF1-, CDX2-

### Treatments

[0480] 2011 Wide local resection, sentinel lymph nodes negative; radiotherapy
2017—Anti-cancer therapy (Tx): Letrozole (2.5 mg/day), Denosumab;
[0481] Radiation (Rx): one bone
[0482] PIT vaccine (3 cycles) as add-on to standard of care

[0483] Bioassay confirmed positive T cell responses (defined as >5 fold above control, or >3 fold above control and >50 spots) to 11 out of the 12 20-mer peptides of the PIT vaccine and 11 out of 12 9-mer peptides having the sequence of the PEPI of each peptide capable of binding to the maximum HLA class I alleles of the patient (FIGS. 26A-B). Long-lasting memory T-cell responses were detected after 14 months of the last vaccination (FIGS. 26C-D).

### Treatment Outcome

[0484] Clinical results of treatment of Patient-C are shown in Table 35. Patient-C has partial response and signs of healing bone metastases.

TABLE 35
Clinical results of treatment of breast cancer Patient-C

| | | +70 days* | +150 days* | +388 days* |
|---|---|---|---|---|
| | Before PIT | (10 w) | (21 w) | (55 w) |
| Bone | Met. breast | Not done | RIB5 is | Not done |
| Biopsy | cancer DCIS | | negative | |
| PET CT | Multiple | Only RIB5 is | Not done | Not done |
| | metastases | DFG avid | | |
| CT | Multiple | Not done | Not done | Healing |
| | metastases | | | bone mets |
| | | | | (sclerotic foci) |
| CA-15-3 | 87 | 50 | 32 | 24 |

*After 3rd cycle of PIT vaccination

Immune responses are shown on FIG. 26. Predicted Immunogenicity, PEPI=12 (CI95% [8,12]
Detected Immunogenicity: 11 (20-mers) & 11 (9-mers) antigen specific T cell responses following 3 PIT vaccinations (FIG. 26A, B). After 4.5, 11 or 14 months of the last vaccination, PIT vaccine-specific immune response could still be detected (FIG. 26 C, D).
Personalised Immunotherapy Composition for Treatment of Patient with Metastatic Colorectal Cancer (Patient-D)

### Tumor Pathology

[0485] 2017 (February) mCRC (MSS) with liver metastases, surgery of primer tumor (in sigmoid colon).
[0486] pT3 pN2b (8/16) M1. KRAS G12D, TP53-C135Y, KDR-Q472H, MET-T1010I mutations. SATB2 expression. EGFR wt, PIK3CA-I391M (non-driver).
   2017 (June) Partial liver resection: KRAS-G12D (35G>A) NRAS wt,
   2018 (May) 2^{nd} resection: SATB2 expression, lung metastases 3→21

### Treatments

[0487] 2017 FOLFOX-4 (oxaliplatin, Ca-folinate, 5-FU)→allergic reaction during 2^{nd} treatment
[0488] DeGramont (5-FU+Ca-folinate)
   2018 (June)→FOLFIRI plus ramucirumab, biweekly; chemoembolization
   2018 (October) PIT vaccination (13 patient-specific peptides, 4 doses) as add-on to standard of care.
   The patient's treatment schedule is shown in FIG. 27.

### Treatment Outcome

[0489] Patient in good overall condition, disease progression in lungs after 8 months confirmed by CT.

[0490] Both PIT induced and pre-existing T cell responses were measured by enriched Fluorospot from PBMC, using 9mer and 20mer peptides for stimulation (FIGS. 28A-B).

[0491] Summary of immune response rate and immunogenicity results prove the proper design for target antigen selection as well as for the induction of multi-peptide targeting immune responses, both CD4+ and CD8+ specific ones.

TABLE 36
Summary table of immunological analysis of Patient A-D

| | Measured immunogenicity for the | | | |
|---|---|---|---|---|
| | different vaccine peptides* | | | |
| Patient ID | CD4+ T cells | | CD8+ T cells | |
| Patient-A | 13/13 | (100%) | 13/13 | (100%) |
| Patient-B | 9/12 | (75%) | 1/12 | (8%) |
| Patient-C | 11/12 | (92%) | 11/12 | (92%) |
| Patient-D | 7/13 | (54%) | 13/13 | (100%) |

| | | |
|---|---|---|
| IRR (ratio of immune | 4/4 | 4/4 |
| responder patients) | | |
| Ratio of immunogenic peptides | 10/12-13 | 10/12-13 |
| (median) | | |

*Following 1-3 cycles of vaccination

The application's sequence listing, which the Patent Office published only in electronic form, follows.

SEQUENCE LISTING (5967 sequences)

SEQ ID NO: 1 - protein, 20 aa, Homo sapiens
PTSSASSFSSSAPFLASAVS

SEQ ID NO: 2 - protein, 20 aa, Homo sapiens
VESTPMIMENIQELIRSAQE

SEQ ID NO: 3 - protein, 20 aa, Homo sapiens
LNWEGVQYLWSFVLENHRRE

SEQ ID NO: 4 - protein, 20 aa, Homo sapiens
PHNFRVYSYSGTGIMKPLDQ

SEQ ID NO: 5 - protein, 20 aa, Homo sapiens
RIVEIVVVIDNYLYIRYERN

SEQ ID NO: 6 - protein, 20 aa, Homo sapiens
RETFMNKFIYEIARRHPFLY

SEQ ID NO: 7 - protein, 20 aa, Homo sapiens
DEVSFYANRLTNLVIAMARK

SEQ ID NO: 8 - protein, 20 aa, Homo sapiens
IDDLSFYVNRLSSLVIQMAH

SEQ ID NO: 9 - protein, 20 aa, Homo sapiens
RTKKELASALKSALSGHLET

SEQ ID NO: 10 - protein, 20 aa, Homo sapiens
ARAVFLALSAQLLQARLMKE

SEQ ID NO: 11 - protein, 20 aa, Homo sapiens
GVVFLALSAQLLQARLMKEE

SEQ ID NO: 12 - protein, 20 aa, Homo sapiens
GAVFLALSAQLLQARLMKEE

SEQ ID NO: 13 - protein, 20 aa, Homo sapiens
NQEYKDAYKFAADVRLMFMN

SEQ ID NO: 14 - protein, 20 aa, Homo sapiens
PSNINQFAAAYFQELTMYRG

SEQ ID NO: 15 - protein, 20 aa, Homo sapiens
KRASQLASKMHSLLALMVGL

SEQ ID NO: 16 - protein, 20 aa, Homo sapiens
QTTQNGRFYAISARFKPFSN

SEQ ID NO: 17 - protein, 20 aa, Homo sapiens
SPASELIAIQDSHSLGSSKS

SEQ ID NO: 18 - protein, 20 aa, Homo sapiens
AKRTSRFLSGIINFIHFREA

SEQ ID NO: 19 - protein, 20 aa, Homo sapiens
EGKDPAFTALLTTQLQVQRE

SEQ ID NO: 20 - protein, 20 aa, Homo sapiens
QGPTAVRKRFFESIIKEAAR

SEQ ID NO: 21 - protein, 20 aa, Homo sapiens
ATAQLQRTPMSALVFPNKIS

SEQ ID NO: 22 - protein, 20 aa, Homo sapiens
LDMVHSLLHRLSHNDHILIE

SEQ ID NO: 23 - protein, 20 aa, Homo sapiens
GNNFIQNFYLPQNYIDQFLL

SEQ ID NO: 24 - protein, 20 aa, Homo sapiens
FAVLFLWRSFRSVTSRLYVR

SEQ ID NO: 25 - protein, 20 aa, Homo sapiens
FAVLFFLWRSFRSVRSRLYV

SEQ ID NO: 26 - protein, 20 aa, Homo sapiens
HTRFTQSGTMKIHILQKHGE

SEQ ID NO: 27 - protein, 20 aa, Homo sapiens
KKNATMLYTASQAFLRHPDV

SEQ ID NO: 28 - protein, 20 aa, Homo sapiens
NEDNIYISNSIYFSIAIVSE

SEQ ID NO: 29 - protein, 20 aa, Homo sapiens
NTGEMSSNSTALALVRPSSS

SEQ ID NO: 30 - protein, 20 aa, Homo sapiens
PPPFFYRRRFVRGPRPPNQQ

SEQ ID NO: 31 - protein, 20 aa, Homo sapiens
SRVLHGYAAQQLPSLLKERE

SEQ ID NO: 32 - protein, 20 aa, Homo sapiens
NLLRGIDSLFSAPMDFRGLP

SEQ ID NO: 33 - protein, 20 aa, Homo sapiens
IAERQRVMAAQVALRRQQAQ

SEQ ID NO: 34 - protein, 20 aa, Homo sapiens
GKKIEVYLRLHRHAYPEQRQ

SEQ ID NO: 35 - protein, 20 aa, Homo sapiens
SERVRTYWIIIELKHKAREK

SEQ ID NO: 36 - protein, 20 aa, Homo sapiens
KGWDLMQNIMNDMPIYMYSV

SEQ ID NO: 37 - protein, 20 aa, Homo sapiens
KRDNRVAYMNPIAMARWRGP

SEQ ID NO: 38 - protein, 20 aa, Homo sapiens
RRQFEFSVDSFQIVLDPMLD

SEQ ID NO: 39 - protein, 20 aa, Homo sapiens
GENQEHLVIAEMMELGSRSR

SEQ ID NO: 40 - protein, 20 aa, Homo sapiens
EHLEVKFMNPYNAVLTKKFQ

SEQ ID NO: 41 - protein, 20 aa, Homo sapiens
SGSSYFVLANGHILPNSENA

SEQ ID NO: 42 - protein, 20 aa, Homo sapiens
ISDTKDYFMSKTLGIGRLKR

SEQ ID NO: 43 - protein, 20 aa, Homo sapiens
GWESGLVAMESAFHLEKNVN

SEQ ID NO: 44 - protein, 20 aa, Homo sapiens
EEMRSHYVAQTGILWLLMNN

SEQ ID NO: 45 - protein, 20 aa, Homo sapiens
SRGKSTYYWPRPRRYVQPPE

SEQ ID NO: 46 - protein, 20 aa, Homo sapiens
WRGRSTYYWPRPRRYVQPPE

SEQ ID NO: 47 - protein, 20 aa, Homo sapiens
EKFKKAMTIGDVSLVQELLD

SEQ ID NO: 48 - protein, 20 aa, Homo sapiens
ALSRHMSSLSHISPFSHSSH

SEQ ID NO: 49 - protein, 20 aa, Homo sapiens
EFVGEFFTDVSLYILGSDIN

SEQ ID NO: 50 - protein, 20 aa, Homo sapiens
DGGNKHFLRNQPLTFALQLH

SEQ ID NO: 51 - protein, 20 aa, Homo sapiens
RLNDLQMSNFVNLKNITYLV

SEQ ID NO: 52 - protein, 20 aa, Homo sapiens
KPHRIRMTHNLLLNYGLYRK

SEQ ID NO: 53 - protein, 20 aa, Homo sapiens
TIFENLKMLNHAPSVQIHDV

SEQ ID NO: 54 - protein, 20 aa, Homo sapiens
KKVNFLDMSLDDIIIYKELE

SEQ ID NO: 55 - protein, 20 aa, Homo sapiens
LINLNVIWMVTPLSNANQPE

SEQ ID NO: 56 - protein, 20 aa, Homo sapiens
PIRSSYFTFQLQNIVKPLPP

SEQ ID NO: 57 - protein, 20 aa, Homo sapiens
KLRYRYTLDDLYPMMNALKL

SEQ ID NO: 58 - protein, 20 aa, Homo sapiens
PDESWALKAIEALSGKIELH

SEQ ID NO: 59 - protein, 20 aa, Homo sapiens
IQNHDIMHAIISPLRSANTV

SEQ ID NO: 60 - protein, 20 aa, Homo sapiens
PDSRLLQLHITMPFSSPMEA

SEQ ID NO: 61 - protein, 20 aa, Homo sapiens
QRNVAIMKSIIPAIVHYSPD

SEQ ID NO: 62 - protein, 20 aa, Homo sapiens
SEELNIILQGNIILSTEKSK

SEQ ID NO: 63 - protein, 20 aa, Homo sapiens
QKYSAHAFQFSPRNVLWLLV

SEQ ID NO: 64 - protein, 20 aa, Homo sapiens
VKVLEYVIKVSARVRFFFPS

SEQ ID NO: 65 - protein, 20 aa, Homo sapiens
DDTTAMASASSSATGSFSYP

SEQ ID NO: 66 - protein, 20 aa, Homo sapiens
DPTSHSYVLVTSLNLSYDGI

SEQ ID NO: 67 - protein, 20 aa, Homo sapiens
ALSRKMAELVHFLLLKYRAR

SEQ ID NO: 68 - protein, 20 aa, Homo sapiens
GREDSVFAHPRKLLMQDLVQ

SEQ ID NO: 69 - protein, 20 aa, Homo sapiens
FPVIFSKASSSLQLVFGIEL

SEQ ID NO: 70 - protein, 20 aa, Homo sapiens
VNARVRIAYPSLREAALLEE

SEQ ID NO: 71 - protein, 20 aa, Homo sapiens
KSPQGASAIPTAIDFTLWRQ

SEQ ID NO: 72 - protein, 20 aa, Homo sapiens
KKLLTQYFVQENYLEYRQVP

SEQ ID NO: 73 - protein, 20 aa, Homo sapiens
RAPEEAIWEALSVMGLYDGR

SEQ ID NO: 74 - protein, 20 aa, Homo sapiens
PAQLEFMFQEALKLKVAELV

SEQ ID NO: 75 - protein, 20 aa, Homo sapiens
DNPSGHTYTLVSKLNLTNDG

SEQ ID NO: 76 - protein, 20 aa, Homo sapiens
SSDPPRFQFLWGPRAYAETS

SEQ ID NO: 77 - protein, 20 aa, Homo sapiens
LIMKTNMLVQFLMEMYKMKK

SEQ ID NO: 78 - protein, 20 aa, Homo sapiens
SSSVLRDTASSSLAFGIPQE

SEQ ID NO: 79 - protein, 20 aa, Homo sapiens
PQILNRTSQHLVVAFGVELK

SEQ ID NO: 80 - protein, 20 aa, Homo sapiens
RPVSSFFSYTLASLLQSSHE

SEQ ID NO: 81 - protein, 20 aa, Homo sapiens
ATVMASESLSVMSSNVSFSE

SEQ ID NO: 82 - protein, 20 aa, Homo sapiens
EPVVPNAPPAYEKLSAEQSP

SEQ ID NO: 83 - protein, 20 aa, Homo sapiens
RSQAGMFIYSNNRLIKMHEK

SEQ ID NO: 84 - protein, 20 aa, Homo sapiens
EIYNEYIYDLFVPVSSKFQK

SEQ ID NO: 85 - protein, 20 aa, Homo sapiens
GVSFFFLSFHISNLQFNSSL

SEQ ID NO: 86 - protein, 20 aa, Homo sapiens
VQPTQKQQKHRLFHWQANSE

SEQ ID NO: 87 - protein, 20 aa, Homo sapiens
EEAFSRASLVSVYNSYPYYP

SEQ ID NO: 88 - protein, 20 aa, Homo sapiens
SLLRKKMLPEASLLIAIKPV

SEQ ID NO: 89 - protein, 20 aa, Homo sapiens
IERLIYLYHKFHQLKVSNEE

SEQ ID NO: 90 - protein, 20 aa, Homo sapiens
QSQGSVLAFTRTFIATPGSS

SEQ ID NO: 91 - protein, 20 aa, Homo sapiens
KRASQYSGQLKVLIAENTML

SEQ ID NO: 92 - protein, 20 aa, Homo sapiens
WTLSRFFSYLRSWDVDDLLL

SEQ ID NO: 93 - protein, 20 aa, Homo sapiens
KEFTVSGNILTIRLTAADHR

SEQ ID NO: 94 - protein, 20 aa, Homo sapiens
DEKRELAKLRRTTNRILASS

SEQ ID NO: 95 - protein, 20 aa, Homo sapiens
ADKDLYVAEALSTLESWRSR

SEQ ID NO: 96 - protein, 20 aa, Homo sapiens
EKSTKYVFDSAPSHSISART

SEQ ID NO: 97 - protein, 20 aa, Homo sapiens
NSPLPFQWRITHSFRWMAQV

SEQ ID NO: 98 - protein, 20 aa, Homo sapiens
ADSVHLAWDLSRSLGAVVFS

SEQ ID NO: 99 - protein, 20 aa, Homo sapiens
MGFLRRLIYRRRPMIYVESS

SEQ ID NO: 100 - protein, 20 aa, Homo sapiens
GPDMEAFQQELALLKIEDEP

SEQ ID NO: 101 - protein, 20 aa, Homo sapiens
RGDGQEAPDVVAFVAPGESQ

SEQ ID NO: 102 - protein, 20 aa, Homo sapiens
GTDVEAFQQELALLKIEDAP

SEQ ID NO: 103 - protein, 20 aa, Homo sapiens
NHPVRFLQAQPIVPVQRAAE

SEQ ID NO: 104 - protein, 20 aa, Homo sapiens
RYKASQDPFPAAIILKVALN

SEQ ID NO: 105 - protein, 20 aa, Homo sapiens
KEMELWMKAMLDAALVQTEP

SEQ ID NO: 106 - protein, 20 aa, Homo sapiens
QYAHKLAFLVGQSIHREPNL

SEQ ID NO: 107 - protein, 20 aa, Homo sapiens
RSVVGFVASINLTLTKWYSR

SEQ ID NO: 108 - protein, 20 aa, Homo sapiens
QKSIAGFVASTNAELTKWYS

SEQ ID NO: 109 - protein, 20 aa, Homo sapiens
RTLNKQGMMMSIATKIAMQM

SEQ ID NO: 110 - protein, 20 aa, Homo sapiens
KAVSQDMVIYSTEIHYSSKG

SEQ ID NO: 111 - protein, 20 aa, Homo sapiens
RLDQLLRHVMNPLETLSITN

SEQ ID NO: 112 - protein, 20 aa, Homo sapiens
KNTPGIYTSLVNYNLWIEKV

SEQ ID NO: 113 - protein, 20 aa, Homo sapiens
SNPIVLRMMNDQLMFLERAF

SEQ ID NO: 114 - protein, 20 aa, Homo sapiens
TKFKQSRAMNFDFPFKKGSG

SEQ ID NO: 115 - protein, 20 aa, Homo sapiens
GSTGFSSRLAATQDLPFIHQ

SEQ ID NO: 116 - protein, 20 aa, Homo sapiens
PPAFINMAATGVSSMSTRDQ

SEQ ID NO: 117 - protein, 20 aa, Homo sapiens
KDSITVFVSNLPYSMQEPDT

SEQ ID NO: 118 - protein, 20 aa, Homo sapiens
NNNIEKMITAFEELRVQAEN

SEQ ID NO: 119 - protein, 20 aa, Homo sapiens
KLNQEYSQQFLTLFQQWDLD

SEQ ID NO: 120 - protein, 20 aa, Homo sapiens
RRHELYKAHEWARAIIESDQ

SEQ ID NO: 121 - protein, 20 aa, Homo sapiens
TSELKTEGVSPYLMLIRLRK

SEQ ID NO: 122 - protein, 20 aa, Homo sapiens
QSSGISFQSKYLSFFILGQT

SEQ ID NO: 123 - protein, 20 aa, Homo sapiens
KERQLSTMITQLISLREQLL

SEQ ID NO: 124 - protein, 20 aa, Homo sapiens
PDNIPAFAAAYFESLLEKRE

SEQ ID NO: 125 - protein, 20 aa, Homo sapiens
EKDPSLVYQHLLYLSKAERF

SEQ ID NO: 126 - protein, 20 aa, Homo sapiens
RDAVKFFVAVPGQVISPQSS

SEQ ID NO: 127 - protein, 20 aa, Homo sapiens
KKMKTSESSTILVVRYRRNV

SEQ ID NO: 128 - protein, 20 aa, Homo sapiens
TRIQFIRWSHTRIFQVPSEM

SEQ ID NO: 129 - protein, 20 aa, Homo sapiens
AEIQALTFLSSDYLSRVYLP

SEQ ID NO: 130 - protein, 20 aa, Homo sapiens
RIQVEHPQMTFGRLHRIIPK

SEQ ID NO: 131 - protein, 20 aa, Homo sapiens
VERPQMTFGRLQGISPKIMP

SEQ ID NO: 132 - protein, 20 aa, Homo sapiens
QRPQMTFGRLQGIFPKIMPK

SEQ ID NO: 133 - protein, 20 aa, Homo sapiens
SEKIVYVYMKLNYEVMTKLG

SEQ ID NO: 134 - protein, 20 aa, Homo sapiens
NQVEHPQMTFGRLQGIFPKI

SEQ ID NO: 135 - protein, 20 aa, Homo sapiens
EFEETAKKVRRAIEQLAAMD

SEQ ID NO: 136 - protein, 20 aa, Homo sapiens
LFLRSQEAAATVQLFQEEHR

SEQ ID NO: 137 - protein, 20 aa, Homo sapiens
ESGQYRANEGTSSIVMEIQK

SEQ ID NO: 138 - protein, 20 aa, Homo sapiens
GADAQYFVYSNESVRPYTPF

SEQ ID NO: 139 - protein, 20 aa, Homo sapiens
RGLPASTLSRLSNRLLLRLE

SEQ ID NO: 140 - protein, 20 aa, Homo sapiens
SSEVLEYMNQLSASLKETYA

SEQ ID NO: 141 - protein, 20 aa, Homo sapiens
LPGYRYLNSWRPSLFYKIAN

SEQ ID NO: 142 - protein, 20 aa, Homo sapiens
LSQFWEFSETTASTVSTTLH

SEQ ID NO: 143 - protein, 20 aa, Homo sapiens
RLLKAGVISAQNIYSFGFGK

SEQ ID NO: 144 - protein, 20 aa, Homo sapiens
GKINQNYASIITEAFPKPKD

SEQ ID NO: 145 - protein, 20 aa, Homo sapiens
VSRAAQMAVPSSRILQLSKP

SEQ ID NO: 146 - protein, 20 aa, Homo sapiens
SSDRTINLLEVLPWPTEWIF

SEQ ID NO: 147 - protein, 20 aa, Homo sapiens
DLDLTYVTERIIAMSFPSSG

SEQ ID NO: 148 - protein, 20 aa, Homo sapiens
RKDQGFLEKEFYHKTNIKMR

SEQ ID NO: 149 - protein, 20 aa, Homo sapiens
EELQKVQFEKVSALADLSST

SEQ ID NO: 150 - protein, 20 aa, Homo sapiens
VIMHSRYRAQRFWSWVGQAN

SEQ ID NO: 151 - protein, 20 aa, Homo sapiens
KIMLFFRSNPYFQNKVITKE

SEQ ID NO: 152 - protein, 20 aa, Homo sapiens
HNRESYMVPFIPLYRNGDFF

SEQ ID NO: 153 - protein, 20 aa, Homo sapiens
RGKKGAATKMAAVTAPEAES

SEQ ID NO: 154 - protein, 20 aa, Homo sapiens
NKRYFKLSHLQMHSRKHTGE

SEQ ID NO: 155 - protein, 20 aa, Homo sapiens
VGILHLGSRQKKIRIQLRSQ

SEQ ID NO: 156 - protein, 20 aa, Homo sapiens
SRQKKIRIQLRSQVLGREMR

SEQ ID NO: 157 - protein, 20 aa, Homo sapiens
MSWRGRSTYRPRPRRSLQPP

SEQ ID NO: 158 - protein, 20 aa, Homo sapiens
MIWRGRSTYRPRPRRSVPPP

SEQ ID NO: 159 - protein, 20 aa, Homo sapiens
KSFKSPKLAKHAAVFSGDKT

SEQ ID NO: 160 - protein, 20 aa, Homo sapiens
ELASNHFLYLPRDVLAQLPS

SEQ ID NO: 161 - protein, 20 aa, Homo sapiens
SHKTPFVSPLLASQSLSIGN

SEQ ID NO: 162 - protein, 20 aa, Homo sapiens
NFSVWLGASVVAHLSTYQSE

SEQ ID NO: 163 - protein, 20 aa, Homo sapiens
EANELLHTFLRWKTSYLVLR

SEQ ID NO: 164 - protein, 20 aa, Homo sapiens
IKVKKLLFSKHLPVFTYTDQ

SEQ ID NO: 165 - protein, 20 aa, Homo sapiens
SGEKNIFLASFVHEYSRRHP

SEQ ID NO: 166 - protein, 20 aa, Homo sapiens
SEGIMTYANSVVSDMMVSIM

SEQ ID NO: 167 - protein, 20 aa, Homo sapiens
DQVNIDYLMNRPQNLRLEMT

SEQ ID NO: 168 - protein, 20 aa, Homo sapiens
STPPSAYGSVKAYTNFDAER

SEQ ID NO: 169 - protein, 20 aa, Homo sapiens
QLLQARLMKEESPVVSWRLE

SEQ ID NO: 170 - protein, 20 aa, Homo sapiens
TALDVHFVSTLEPLSNAVKR

SEQ ID NO: 171 - protein, 20 aa, Homo sapiens
KEMLAKKHFSYAWPFYNPVD

SEQ ID NO: 172 - protein, 20 aa, Homo sapiens
AKYSSVYMEAEATALLSDTS

SEQ ID NO: 173 - protein, 20 aa, Homo sapiens
ENHPKSMTMMPALFKENRND

SEQ ID NO: 174 - protein, 20 aa, Homo sapiens
FSNKGKTLVIQYTVKHEQKM

SEQ ID NO: 175 - protein, 20 aa, Homo sapiens
TVFGEKSVITLSSIFTKDLV

SEQ ID NO: 176 - protein, 20 aa, Homo sapiens
TLSFPRYNVAEIVIHIRNKI

SEQ ID NO: 177 - protein, 20 aa, Homo sapiens
PTSWSSAIQSWYDEILDFVY

SEQ ID NO: 178 - protein, 20 aa, Homo sapiens
SPSYQKRQRMALLARKQGAG

SEQ ID NO: 179 - protein, 20 aa, Homo sapiens
DALQKKYLRMVVLAVYTNPE

SEQ ID NO: 180 - protein, 20 aa, Homo sapiens
EEGNEAANFDLAVVARRYPA

SEQ ID NO: 181 - protein, 20 aa, Homo sapiens
FLFGGNNFIQNFYLPQNYID

SEQ ID NO: 182 - protein, 20 aa, Homo sapiens
ALKKLIHAAKLNASLKTLEG

SEQ ID NO: 183 - protein, 20 aa, Homo sapiens
MFTSSRMSSFNRHMKTHTSE

SEQ ID NO: 184 - protein, 20 aa, Homo sapiens
SSDSSMLDSATSLIQAAKNL

SEQ ID NO: 185 - protein, 20 aa, Homo sapiens
RNGVIDYTIFFTLDSVKLPD

SEQ ID NO: 186 - protein, 20 aa, Homo sapiens
DLSRDILNNFPHSIARQKRI

SEQ ID NO: 187 - protein, 20 aa, Homo sapiens
DKPVLAIQVLGTVKWFNVRN

SEQ ID NO: 188 - protein, 20 aa, Homo sapiens
GQGSLLFYDIRAQRFLEERL

SEQ ID NO: 189 - protein, 20 aa, Homo sapiens
TELHPRVAFWIIKLPRRRSH

SEQ ID NO: 190 - protein, 20 aa, Homo sapiens
SDSTYYSSFYQPSLFPYYNN

SEQ ID NO: 191 - protein, 20 aa, Homo sapiens
MLASWARIAARAVQPKALNS

SEQ ID NO: 192 - protein, 20 aa, Homo sapiens
PGQTLIYYVDEKAPEFSMQG

SEQ ID NO: 193 - protein, 20 aa, Homo sapiens
DLAPDTTYLVQVQALTQEGQ

SEQ ID NO: 194 - protein, 20 aa, Homo sapiens
EKEKDVRSLSKKRKKSYPDD

SEQ ID NO: 195 - protein, 20 aa, Homo sapiens
KNLELKFVSSLRRQFEFSVD

SEQ ID NO: 196 - protein, 20 aa, Homo sapiens
EVMRRQLYAVNRRLRALEEQ

SEQ ID NO: 197 - protein, 20 aa, Homo sapiens
NLKVNFFFERIMKYERLARI

SEQ ID NO: 198 - protein, 20 aa, Homo sapiens
QSLEEDSALEALLNFFFPTT

SEQ ID NO: 199 - protein, 20 aa, Homo sapiens
KLQELSAASPTISSFSPRLE

SEQ ID NO: 200 - protein, 20 aa, Homo sapiens
LELYTSYLYLSMAFYFNRDD

SEQ ID NO: 201 - protein, 20 aa, Homo sapiens
MSWRGRSTYRPRPRRYVEPP

SEQ ID NO: 202 - protein, 20 aa, Homo sapiens
MNLSRGKSTYYWPRPRRYVQ

SEQ ID NO: 203 - protein, 20 aa, Homo sapiens
MSWRGRSTYYWPRPRRYVQP

SEQ ID NO: 204 - protein, 20 aa, Homo sapiens
DREKDHIFSSYTAFGDLEVF

SEQ ID NO: 205 - protein, 20 aa, Homo sapiens
GLYYKLHNINRPLTMKKEGI

SEQ ID NO: 206 - protein, 20 aa, Homo sapiens
ELIQKLKSFISFYSALPGYI

SEQ ID NO: 207 - protein, 20 aa, Homo sapiens
VLMAVVLASLIYRRRLMKQD

SEQ ID NO: 208 - protein, 20 aa, Homo sapiens
SATWPHSVHRLAQSYLKEPM

SEQ ID NO: 209 - protein, 20 aa, Homo sapiens
GAGKGKYYAVNYPLRDGIDD

SEQ ID NO: 210 - protein, 20 aa, Homo sapiens
GAGKGKYYAVNFPMRDGIDD

SEQ ID NO: 211 - protein, 20 aa, Homo sapiens
QEAFYLTDRVMTVSFHKYGN

SEQ ID NO: 212 - protein, 20 aa, Homo sapiens
MASFRKLTLSEKVPPNHPSR

SEQ ID NO: 213 - protein, 20 aa, Homo sapiens
QVQGTVTIRNISALSSGLYQ

SEQ ID NO: 214 - protein, 20 aa, Homo sapiens
QLQNIVKPLPPVYLTFTRES

SEQ ID NO: 215 - protein, 20 aa, Homo sapiens
RGHYERILNPYNLFLSGDSL

SEQ ID NO: 216 - protein, 20 aa, Homo sapiens
YENDIASMNLQAHLIPGLNL

SEQ ID NO: 217 - protein, 20 aa, Homo sapiens
ATVLTNMAMQEPLRLNIQNH

SEQ ID NO: 218 - protein, 20 aa, Homo sapiens
GAVLKDFTVSGNLLFMSVRD

SEQ ID NO: 219 - protein, 20 aa, Homo sapiens
WAIGLSVMDLVGSILKNLRR

SEQ ID NO: 220 - protein, 20 aa, Homo sapiens
LPSTRKLYEKKLVQLLVSPP

SEQ ID NO: 221 - protein, 20 aa, Homo sapiens
AQFYNDFVNISSIGLTYFQS

SEQ ID NO: 222 - protein, 20 aa, Homo sapiens
VSARVRFFFPSLREAALREE

SEQ ID NO: 223 - protein, 20 aa, Homo sapiens
LESVIRNYEDHFPLLFSEAS

SEQ ID NO: 224 - protein, 20 aa, Homo sapiens
YAGREHFLFGEPKRLLTQNW

SEQ ID NO: 225 - protein, 20 aa, Homo sapiens
SVIRNFQDFFPVIFSKASEY

SEQ ID NO: 226 - protein, 20 aa, Homo sapiens
PDLESEFQAAISRKMVELVH

SEQ ID NO: 227 - protein, 20 aa, Homo sapiens
VVGNWQYFFPVIFSKASSSL

SEQ ID NO: 228 - protein, 20 aa, Homo sapiens
ETSYVKVLEHVVRVNARVRI

SEQ ID NO: 229 - protein, 20 aa, Homo sapiens
ESVFRAALSKKVADLIHFLL

SEQ ID NO: 230 - protein, 20 aa, Homo sapiens
VVGNWQYFFPVIFSKASDSL

SEQ ID NO: 231 - protein, 20 aa, Homo sapiens
DGREHSVYWKLRKLLTQEWV

SEQ ID NO: 232 - protein, 20 aa, Homo sapiens
AHAETSYEKVINYLVMLNAR

SEQ ID NO: 233 - protein, 20 aa, Homo sapiens
TEEEIWKFMNVLGAYDGEEH

SEQ ID NO: 234 - protein, 20 aa, Homo sapiens
QFLWGPRAYAETSKMKVLEF

SEQ ID NO: 235 - protein, 20 aa, Homo sapiens
TNKKKVSFSSPLILGATIQK

SEQ ID NO: 236 - protein, 20 aa, Homo sapiens
SLTRKTKMLVQFLLYKYKMK

SEQ ID NO: 237 - protein, 20 aa, Homo sapiens
GPRAYAETTKMRVLRVLADS

SEQ ID NO: 238 - protein, 20 aa, Homo sapiens
NPASSFFSSALLSIFQSSPE

SEQ ID NO: 239 - protein, 20 aa, Homo sapiens
SSASSTLYLVFSPSSFSTSS

SEQ ID NO: 240 - protein, 20 aa, Homo sapiens
NAPPAYEKLSAEQSPPPYSP

SEQ ID NO: 241 - protein, 20 aa, Homo sapiens
DDPQKFAMELSIIYKYSPFK

SEQ ID NO: 242 - protein, 20 aa, Homo sapiens
YEQANLNMANSIKFSVWVSF

SEQ ID NO: 243 - protein, 20 aa, Homo sapiens
NIKFRPGSVVVQLTLAFREG

SEQ ID NO: 244 - protein, 20 aa, Homo sapiens
HRLFHWQANSERADIPASLR

SEQ ID NO: 245 - protein, 20 aa, Homo sapiens
PQKRSRAAFSHTQVIELERK

SEQ ID NO: 246 - protein, 20 aa, Homo sapiens
GINNVSFSGQSVLLFEVLFY

SEQ ID NO: 247 - protein, 20 aa, Homo sapiens
IPHLFSYSGHSPLLPQQARS

SEQ ID NO: 248 - protein, 20 aa, Homo sapiens
QEMVQAFSAQSGMKLEWSQK

SEQ ID NO: 249 - protein, 20 aa, Homo sapiens
SVVAKLLSHGAVIEVHNKAS

SEQ ID NO: 250 - protein, 20 aa, Homo sapiens
NAEDWNLYWRTSSFRMTEHN

SEQ ID NO: 251 - protein, 20 aa, Homo sapiens
AMPFATPMEAELARRSLAQD

SEQ ID NO: 252 - protein, 20 aa, Homo sapiens
LRPSLRSLERKAIRAIEDEK

SEQ ID NO: 253 - protein, 20 aa, Homo sapiens
GDGPYSTFLTSSPIRSRSPP

SEQ ID NO: 254 - protein, 20 aa, Homo sapiens
DVRVTKFKAPQYTMAARVEP

SEQ ID NO: 255 - protein, 20 aa, Homo sapiens
LGQDGRLLSSTLSLSSNRSL

SEQ ID NO: 256 - protein, 20 aa, Homo sapiens
RSLGAVVFSRVTNNVVLEAP

SEQ ID NO: 257 - protein, 20 aa, Homo sapiens
NDQESSQPVGSVIVQEPTEE

SEQ ID NO: 258 - protein, 20 aa, Homo sapiens
MSARVRSRSRGRGDGQEAPD

SEQ ID NO: 259 - protein, 20 aa, Homo sapiens
RGNDQESSQPVGPVIVQQPT

SEQ ID NO: 260 - protein, 20 aa, Homo sapiens
SSQRKLNWIPSFPTYDYFNQ

SEQ ID NO: 261 - protein, 20 aa, Homo sapiens
LTLWEMMTLSIPHINLSNDD

SEQ ID NO: 262 - protein, 20 aa, Homo sapiens
GWEEAYTFEGARYYINHNER

SEQ ID NO: 263 - protein, 20 aa, Homo sapiens
NSLIQNLFKVTPAMGMQMRK

SEQ ID NO: 264 - protein, 20 aa, Homo sapiens
LVGRNFYDPTSAMVLQQHRL

SEQ ID NO: 265 - protein, 20 aa, Homo sapiens
LRYYNILFRRTFKLLDFEQV

SEQ ID NO: 266 - protein, 20 aa, Homo sapiens
YIPDLASRRLRIALLYSHSE

SEQ ID NO: 267 - protein, 20 aa, Homo sapiens
GIRAKAVSQDMVIYSTEIHY

SEQ ID NO: 268 - protein, 20 aa, Homo sapiens
SPEKEEQYIAQFTSQFLSLQ

SEQ ID NO: 269 - protein, 20 aa, Homo sapiens
DFKRANMDNDIALLLLASPI

SEQ ID NO: 270 - protein, 20 aa, Homo sapiens
QSGAAVVHEIVRSFGTLKKE

SEQ ID NO: 271 - protein, 20 aa, Homo sapiens
VVRLSSYSSPTLQSVLGSGT

SEQ ID NO: 272 - protein, 20 aa, Homo sapiens
QLEPDYFKDMTPTIRKTQKI

SEQ ID NO: 273 - protein, 20 aa, Homo sapiens
RQFVEFTIKEAARFKKVVLI

SEQ ID NO: 274 - protein, 20 aa, Homo sapiens
KELEELRAAFTRALEYLKQE

SEQ ID NO: 275 - protein, 20 aa, Homo sapiens
QHKIAEMVALMEKHKHQYDK

SEQ ID NO: 276 - protein, 20 aa, Homo sapiens
METQQQEIASVRKSLQSMLF

SEQ ID NO: 277 - protein, 20 aa, Homo sapiens
DSEFFLTTASGVSVLPQNRS

SEQ ID NO: 278 - protein, 20 aa, Homo sapiens
EISILQEQISHLQFVIHSQH

SEQ ID NO: 279 - protein, 20 aa, Homo sapiens
KKHRYLRLLPEALIRFGGFR

SEQ ID NO: 280 - protein, 20 aa, Homo sapiens
SEPHIKRPMNAFMVWAKDER

SEQ ID NO: 281 - protein, 20 aa, Homo sapiens
KEEVAAVKIQAAFRGHIARE

SEQ ID NO: 282 - protein, 20 aa, Homo sapiens
YYTRSISALPTVVAYNNRAQ

SEQ ID NO: 283 - protein, 20 aa, Homo sapiens
REEAQKMSSLLPTMWLGAQN

SEQ ID NO: 284 - protein, 20 aa, Homo sapiens
NPLQMEEEEFMEIMVEIPAK

SEQ ID NO: 285 - protein, 20 aa, Homo sapiens
KGVGLPFLPITSSDIDVVES

SEQ ID NO: 286 - protein, 20 aa, Homo sapiens
KSAQKFSLILKILSMIYKLV

SEQ ID NO: 287 - protein, 20 aa, Homo sapiens
EKISYVYMKRNYKAMTKLGF

SEQ ID NO: 288 - protein, 20 aa, Homo sapiens
EWEKMKASEKIFYVYMKRKY

SEQ ID NO: 289 - protein, 20 aa, Homo sapiens
EKIVYVYMKRKYEAMTKLGF

SEQ ID NO: 290 - protein, 20 aa, Homo sapiens
VERPQMTFGSLQRIFPKIMP

SEQ ID NO: 291 - protein, 20 aa, Homo sapiens
EKIIYVYMKRKYEAMTKLGF

SEQ ID NO: 292 - protein, 20 aa, Homo sapiens
QPFLKDHRISTFKNWPFLEG

SEQ ID NO: 293 - protein, 20 aa, Homo sapiens
EPRVEVLINRINEVQQAKKK

SEQ ID NO: 294 - protein, 20 aa, Homo sapiens
NLTLKNHFQSVLEQLELQEK

SEQ ID NO: 295 - protein, 20 aa, Homo sapiens
AEDTRLFAPSIKARFPAETY

SEQ ID NO: 296 - protein, 20 aa, Homo sapiens
NLEPLVSRDPPASASLFQDT

SEQ ID NO: 297 - protein, 20 aa, Homo sapiens
WAERIMFSDLRSLQLKKTME

SEQ ID NO: 298 - protein, 20 aa, Homo sapiens
TLQEIFQAENTIMLLERSIM

SEQ ID NO: 299 - protein, 20 aa, Homo sapiens
NDKDSLSQFWEFSETTASTV

SEQ ID NO: 300 - protein, 20 aa, Homo sapiens
KSDIYSFSMIMQEILTDDIP

SEQ ID NO: 301 - protein, 20 aa, Homo sapiens
TLVELQMMMETIQFIENKKR

SEQ ID NO: 302 - protein, 20 aa, Homo sapiens
VTKKVVASPRIISLAKPKVR

SEQ ID NO: 303 - protein, 20 aa, Homo sapiens
RRTPTTSSDRTINLLEVLPW

SEQ ID NO: 304 - protein, 20 aa, Homo sapiens
SKIKKIVHSIVSSFAFGLFG

SEQ ID NO: 305 - protein, 20 aa, Homo sapiens
MWMGLIQLVEGVKRKDQGFL

SEQ ID NO: 306 - protein, 20 aa, Homo sapiens
RQNYSSNAYHMSSTMKPNTK

SEQ ID NO: 307 - protein, 20 aa, Homo sapiens
SSRPRLLWQTPTTQTLPSTT

SEQ ID NO: 308 - protein, 20 aa, Homo sapiens
DEDEDMLSYMVSLEVGEEKH

SEQ ID NO: 309 - protein, 20 aa, Homo sapiens
HNALHIYMNGTMSQVQGSAN

SEQ ID NO: 310 - protein, 20 aa, Homo sapiens
VAKKGKAVRRGRRGKKGAAT

SEQ ID NO: 311 - protein, 20 aa, Homo sapiens
PSQASSGQARMFPNAPYLPS

SEQ ID NO: 312 - protein, 20 aa, Homo sapiens
KKKNQQLKVGILHLGSRQKK

SEQ ID NO: 313 - protein, 20 aa, Homo sapiens
PRRSLQPPELIGAMLEPTDE

SEQ ID NO: 314 - protein, 20 aa, Homo sapiens
GRAFNLNSHLIRHQRIHTRE

SEQ ID NO: 315 - protein, 20 aa, Homo sapiens
DGRLRLARLALVLLGWVSSS

SEQ ID NO: 316 - protein, 20 aa, Homo sapiens
RNQNPGSLLQLPHTEALLVL

SEQ ID NO: 317 - protein, 20 aa, Homo sapiens
DRKKMLEILFELLHVPSVLL

SEQ ID NO: 318 - protein, 20 aa, Homo sapiens
RRYIENIYHSKPMRWPFFLF

SEQ ID NO: 319 - protein, 20 aa, Homo sapiens
EIKPLAFSTTFEHLVYKMDS

SEQ ID NO: 320 - protein, 20 aa, Homo sapiens
QKLGEYYLQNAFLVAYTKKA

SEQ ID NO: 321 - protein, 20 aa, Homo sapiens
SVVSDMMVSIMKTLKIQVKD

SEQ ID NO: 322 - protein, 20 aa, Homo sapiens
LDSQKMDMSNIVLMLIQKLL

SEQ ID NO: 323 - protein, 20 aa, Homo sapiens
RDKVLIRIMVSRSEVDMLKI

SEQ ID NO: 324 - protein, 20 aa, Homo sapiens
QARLMKEESPVVSWRLEPED

SEQ ID NO: 325 - protein, 20 aa, Homo sapiens
FVQNTLTKLLKDRRKMQTVQ

SEQ ID NO: 326 - protein, 20 aa, Homo sapiens
LKDLWKHSFSWPFQRPVDAV

SEQ ID NO: 327 - protein, 20 aa, Homo sapiens
QADIEVMSTVHISSVYNDVP

SEQ ID NO: 328 - protein, 20 aa, Homo sapiens
SRLEKLLTQVRNLQFMSENE

SEQ ID NO: 329 - protein, 20 aa, Homo sapiens
HLYTLILRPDLSYDVKIDGQ

SEQ ID NO: 330 - protein, 20 aa, Homo sapiens
NSPTSLLIYKDAPAFNEKAS

SEQ ID NO: 331 - protein, 20 aa, Homo sapiens
RETYMEFLWQYKSSADKMQQ

SEQ ID NO: 332 - protein, 20 aa, Homo sapiens
GENLYMSSDPTSWSSAIQSW

SEQ ID NO: 333 - protein, 20 aa, Homo sapiens
GQKYEKIFEMLEGVQGPTAV

SEQ ID NO: 334 - protein, 20 aa, Homo sapiens
YQFKFKYTNNGPLMDFISKN

SEQ ID NO: 335 - protein, 20 aa, Homo sapiens
LGEEEGEQAAGLAAVPRGGS

SEQ ID NO: 336 - protein, 20 aa, Homo sapiens
QNFYLPQNYIDQFLLTSFPT

SEQ ID NO: 337 - protein, 20 aa, Homo sapiens
LYVRREKKFAVALSGLIEEK

SEQ ID NO: 338 - protein, 20 aa, Homo sapiens
TERLLKMKDWAAMLGEDITD

SEQ ID NO: 339 - protein, 20 aa, Homo sapiens
SEAVELQDMSLLSIQQQEGV

SEQ ID NO: 340 - protein, 20 aa, Homo sapiens
SVKRGTMVRAARALLSAVTR

SEQ ID NO: 341 - protein, 20 aa, Homo sapiens
SNSIYFSIAIVSEDFVPYKG

SEQ ID NO: 342 - protein, 20 aa, Homo sapiens
IVFWKYRRFQRNTGEMSSNS

SEQ ID NO: 343 - protein, 20 aa, Homo sapiens
DTKEDVFVHQTAIKRNNPRK

SEQ ID NO: 344 - protein, 20 aa, Homo sapiens
VKRSLVYYLKNREVRLQNET

SEQ ID NO: 345 - protein, 20 aa, Homo sapiens
GLTGLQSLLQGFSRLFLKGN

SEQ ID NO: 346 - protein, 20 aa, Homo sapiens
MENRHAMSSQYRMHSYYPPP

SEQ ID NO: 347 - protein, 20 aa, Homo sapiens
VDDEESVILTLVPVKDDANM

SEQ ID NO: 348 - protein, 20 aa, Homo sapiens
VVAGIVVLVISRKKRMAKYE

SEQ ID NO: 349 - protein, 20 aa, Homo sapiens
GIMGQFSHHNIIRLEGVISK

SEQ ID NO: 350 - protein, 20 aa, Homo sapiens
NRVAYMNPIAMARWRGPTQS

SEQ ID NO: 351 - protein, 20 aa, Homo sapiens
NGSVASYILASHNGISYKDL

SEQ ID NO: 352 - protein, 20 aa, Homo sapiens
SAKRVWNMTATRPKKMGSQL

SEQ ID NO: 353 - protein, 20 aa, Homo sapiens
SPQFKKTMSTFHNLVSLNLN

SEQ ID NO: 354 - protein, 20 aa, Homo sapiens
RESLKMRVSKPFGMLMLSIW

SEQ ID NO: 355 - protein, 20 aa, Homo sapiens
RPGSRSSNASLEVLSTEPGS

SEQ ID NO: 356 - protein, 20 aa, Homo sapiens
DDVALENFFRYFLRLSDDKM

SEQ ID NO: 357 - protein, 20 aa, Homo sapiens
RGRSTYYWPRPRRYVQPPEM

SEQ ID NO: 358 - protein, 20 aa, Homo sapiens
DSGISVDSNFQYGWTPLMYA

SEQ ID NO: 359 - protein, 20 aa, Homo sapiens
PGLSHSYMDAAQYPLPEEVD

SEQ ID NO: 360 - protein, 20 aa, Homo sapiens
EQLLQSASMELKFLIIQNAA

SEQ ID NO: 361 - protein, 20 aa, Homo sapiens
TLIGANASFSIALNFPGSQK

SEQ ID NO: 362 - protein, 20 aa, Homo sapiens
DRQTVMTSATWPHSVHRLAQ

SEQ ID NO: 363 - protein, 20 aa, Homo sapiens
EEAFYTTDRVMTVSFHKYGE

SEQ ID NO: 364 - protein, 20 aa, Homo sapiens
SEYFEYFAPDFTLHPDVSTR

SEQ ID NO: 365 - protein, 20 aa, Homo sapiens
ATQRDLIATQRDLIVTQRDL

SEQ ID NO: 366 - protein, 20 aa, Homo sapiens
NQPEQVILYQGGQMFDGAPR

SEQ ID NO: 367 - protein, 20 aa, Homo sapiens
EGEDLSKKTLLRFWLPFGFI

SEQ ID NO: 368 - protein, 20 aa, Homo sapiens
TLDDLYPMMNALKLRAESYN

SEQ ID NO: 369 - protein, 20 aa, Homo sapiens
QHIKQLSRFAGASIKIAPAE

SEQ ID NO: 370 - protein, 20 aa, Homo sapiens
DPDFSMYVYEVTKSILPITN

SEQ ID NO: 371 - protein, 20 aa, Homo sapiens
HITMPFSSPMEAELVRRILS

SEQ ID NO: 372 - protein, 20 aa, Homo sapiens
TSGKDYSVSANSRIVIVTAG

SEQ ID NO: 373 - protein, 20 aa, Homo sapiens
PSKGRRWAARAPSTRITYGT

SEQ ID NO: 374 - protein, 20 aa, Homo sapiens
PDKTMMDGSFSFKLLNQLGM

SEQ ID NO: 375 - protein, 20 aa, Homo sapiens
RALAETSYVKVLEYVIKVSA

SEQ ID NO: 376 - protein, 20 aa, Homo sapiens
DEKVTDLVQFLLFKYQMKEP

SEQ ID NO: 377 - protein, 20 aa, Homo sapiens
DKIIDLVHLLLRKYRVKGLI

SEQ ID NO: 378 - protein, 20 aa, Homo sapiens
PDLETSFQVALSRKMAELVH

SEQ ID NO: 379 - protein, 20 aa, Homo sapiens
PQGASSFSTTINYTLWRQSD

SEQ ID NO: 380 - protein, 20 aa, Homo sapiens
LSRKVAELVHFLLLKYRARE

SEQ ID NO: 381 - protein, 20 aa, Homo sapiens
TTEEQEAAVSSSSPLVPGTL

SEQ ID NO: 382 - protein, 20 aa, Homo sapiens
TTEEQEAVSSSSPLVPGTLG

SEQ ID NO: 383 - protein, 20 aa, Homo sapiens
QAALSRKVAKLVHFLLLKYR

SEQ ID NO: 384 - protein, 20 aa, Homo sapiens
EALDEKVAELVRFLLRKYQI

SEQ ID NO: 385 - protein, 20 aa, Homo sapiens
VIKNYKRYFPVIFGKASEFM

SEQ ID NO: 386 - protein, 20 aa, Homo sapiens
NSDPPRYQFLWGPRAYAETT

SEQ ID NO: 387 - protein, 20 aa, Homo sapiens
FPEILKKASEGLSVVFGLEL

SEQ ID NO: 388 - protein, 20 aa, Homo sapiens
YDGKKHFIFGEPRKLITQDL

SEQ ID NO: 389 - protein, 20 aa, Homo sapiens
NSDPPRYQFLWGPRAHAETS

SEQ ID NO: 390 - protein, 20 aa, Homo sapiens
GLYPHLYEDALIDEVERALR

SEQ ID NO: 391 - protein, 20 aa, Homo sapiens
EVDPDDSYVFVNTLDLTSEG

SEQ ID NO: 392 - protein, 20 aa, Homo sapiens
GREHFVYGEPRELLTKVWVQ

SEQ ID NO: 393 - protein, 20 aa, Homo sapiens
EDFPARWSFRAYTSVLYFNP

SEQ ID NO: 394 - protein, 20 aa, Homo sapiens
ADIKKQAEIAHLYIASLPDP

SEQ ID NO: 395 - protein, 20 aa, Homo sapiens
STEKNAVSMTSSVLSSHSPG

SEQ ID NO: 396 - protein, 20 aa, Homo sapiens
IWFQNRRYKTKRKQLSSELG

SEQ ID NO: 397 - protein, 20 aa, Homo sapiens
QPERLLFVIDSFEELQGGLN

SEQ ID NO: 398 - protein, 20 aa, Homo sapiens
MKAINFLNQDIRGLTSASQL

SEQ ID NO: 399 - protein, 20 aa, Homo sapiens
ASPQETQSAFSIPVSTLSSS

SEQ ID NO: 400 - protein, 20 aa, Homo sapiens
HHIHEQIMEYIRKLSKNHQN

SEQ ID NO: 401 - protein, 20 aa, Homo sapiens
SRHTPHKTLMPYASLFQSHS

SEQ ID NO: 402 - protein, 20 aa, Homo sapiens
EAELARRSLAQDAPPLPVPG

SEQ ID NO: 403 - protein, 20 aa, Homo sapiens
STNRSMQNYVQFLKSSYANV

SEQ ID NO: 404 - protein, 20 aa, Homo sapiens
SAPSHSISARTKAFRVDSTP

SEQ ID NO: 405 - protein, 20 aa, Homo sapiens
RWPVDVSNRIHTSAHVMSMG

SEQ ID NO: 406 - protein, 20 aa, Homo sapiens
SRVTNNVVLEAPFLVGIEGS

SEQ ID NO: 407 - protein, 20 aa, Homo sapiens
QAVPAFQGPDMEAFQQELAL

SEQ ID NO: 408 - protein, 20 aa, Homo sapiens
EPAAAAAAAAISDDQIDIAE

SEQ ID NO: 409 - protein, 20 aa, Homo sapiens
EDPKDRPSAAHIVEALETDV

SEQ ID NO: 410 - protein, 20 aa, Homo sapiens
PTPESSTIASYVTLRKTKKM

SEQ ID NO: 411 - protein, 20 aa, Homo sapiens
QWALYQYHIDYNPLMEARRL

SEQ ID NO: 412 - protein, 20 aa, Homo sapiens
FYNVVFRRVMKLLDMKLVGR

SEQ ID NO: 413 - protein, 20 aa, Homo sapiens
HYAHKLAYLVGQSIHQEPNR

SEQ ID NO: 414 - protein, 20 aa, Homo sapiens
FERKLLFSADVSYKVLRNET

SEQ ID NO: 415 - protein, 20 aa, Homo sapiens
QEAQPLQPSHFLDISEDWSL

SEQ ID NO: 416 - protein, 20 aa, Homo sapiens
NLRRLLLSHIHASSYISPEK

SEQ ID NO: 417 - protein, 20 aa, Homo sapiens
KNSVKTDLMKAPMVIMDWEE

SEQ ID NO: 418 - protein, 20 aa, Homo sapiens
TPLMYSLVHNLTKELKSPDE

SEQ ID NO: 419 - protein, 20 aa, Homo sapiens
EIQALRRLNPHPNILMLHEV

SEQ ID NO: 420 - protein, 20 aa, Homo sapiens
MTPTIRKTQKIVIKKREPLN

SEQ ID NO: 421 - protein, 20 aa, Homo sapiens
NGQAASDNVFSTVPPAFINM

SEQ ID NO: 422 - protein, 20 aa, Homo sapiens
KNPDFKVFRYSTSLEKHKLF

SEQ ID NO: 423 - protein, 20 aa, Homo sapiens
ASLEIELSNLKAELLSVKKQ

SEQ ID NO: 424 - protein, 20 aa, Homo sapiens
AKRKRLEMYTKASLKTSNQK

SEQ ID NO: 425 - protein, 20 aa, Homo sapiens
RSIFKPFIFVDDVKLVPKTQ

SEQ ID NO: 426 - protein, 20 aa, Homo sapiens
MEDNSALYESTSAHIIEETE

SEQ ID NO: 427 - protein, 20 aa, Homo sapiens
RVVPDKLRSLALGVSYVILR

SEQ ID NO: 428 - protein, 20 aa, Homo sapiens
GSSLDILSSLNSPALFGDQD

SEQ ID NO: 429 - protein, 20 aa, Homo sapiens
SSEEDKEKEEVAAVKIQAAF

SEQ ID NO: 430 - protein, 20 aa, Homo sapiens
NRALELHPFSMKPLLRRAMA

SEQ ID NO: 431 - protein, 20 aa, Homo sapiens
EDGRVQAFGWSLPQKYKQVT

SEQ ID NO: 432 - protein, 20 aa, Homo sapiens
ESSTILVVRYRRNVKRTSPE

SEQ ID NO: 433 - protein, 20 aa, Homo sapiens
EQVRRSISRLTDVSAQDFSM

SEQ ID NO: 434 - protein, 20 aa, Homo sapiens
QGIRNLVTDAKFVLIVEKDA

SEQ ID NO: 435 - protein, 20 aa, Homo sapiens
WKKMKYSEKISYVYMKRNYK

SEQ ID NO: 436 - protein, 20 aa, Homo sapiens
EKIFYVYMKRKYEAMTKLGF

SEQ ID NO: 437 - protein, 20 aa, Homo sapiens
EWEKMKVSEKIVYVYMKRKY

SEQ ID NO: 438 - protein, 20 aa, Homo sapiens
EWEKMKSSEKIVYVYMKLNY

SEQ ID NO: 439 - protein, 20 aa, Homo sapiens
EWEKMKASEKIIYVYMKRKY

SEQ ID NO: 440 - protein, 20 aa, Homo sapiens
TLPPAWQPFLKDHRISTFKN

SEQ ID NO: 441 - protein, 20 aa, Homo sapiens
KNKQRQLRLAFEEQLEDLMG

SEQ ID NO: 442 - protein, 20 aa, Homo sapiens
QRQKDLIMKVENLTLKNHFQ

SEQ ID NO: 443 - protein, 20 aa, Homo sapiens
DFSTKSVFSKFAQLNLAAED

SEQ ID NO: 444 - protein, 20 aa, Homo sapiens
GGAESERGLPASTLSRLSNR

SEQ ID NO: 445 - protein, 20 aa, Homo sapiens
GDFYVQLYSSEVLEYMNQLS

SEQ ID NO: 446 - protein, 20 aa, Homo sapiens
DQMWRQFTDTNLAFNARISE

SEQ ID NO: 447 - protein, 20 aa, Homo sapiens
MTVEADPANMFNWTTEEVET

SEQ ID NO: 448 - protein, 20 aa, Homo sapiens
QMAYLGSLPVIGEKEVIQAD

SEQ ID NO: 449 - protein, 20 aa, Homo sapiens
LKKSKYFISTYIDFVPYIAS

SEQ ID NO: 450 - protein, 20 aa, Homo sapiens
TERFLEDTTLTITVPAVSRR

SEQ ID NO: 451 - protein, 20 aa, Homo sapiens
LYDDVKVQFFYSNLPTYYDN

SEQ ID NO: 452 - protein, 20 aa, Homo sapiens
DQVDWSRLLRDAGLVKMSRK

SEQ ID NO: 453 - protein, 20 aa, Homo sapiens
MANERISMQNLEALLVANRD

SEQ ID NO: 454 - protein, 20 aa, Homo sapiens
DNFYHNFTKIPTLVQIIKSQ

SEQ ID NO: 455 - protein, 20 aa, Homo sapiens
LVNITEYRASHSTPIEWYPD

SEQ ID NO: 456 - protein, 20 aa, Homo sapiens
ADASQSSMHNALHIYMNGTM

SEQ ID NO: 457 - protein, 20 aa, Homo sapiens
AVRRGRRGKKGAATKMAAVT

SEQ ID NO: 458 - protein, 20 aa, Homo sapiens
TWNQMNLGATLKGVAAGSSS

SEQ ID NO: 459 - protein, 20 aa, Homo sapiens
QTPGINLDLGSGVKVKIIPK

SEQ ID NO: 460 - protein, 20 aa, Homo sapiens
QLKVGILHLGSRQKKIRIQL

SEQ ID NO: 461 - protein, 20 aa, Homo sapiens
TPDQKREDDQGAAEIQVPDL

SEQ ID NO: 462 - protein, 20 aa, Homo sapiens
KEQILELLVLEQFLTILPGD

SEQ ID NO: 463 - protein, 20 aa, Homo sapiens
NSLVSLTYVSFRNLTHLESL

SEQ ID NO: 464 - protein, 20 aa, Homo sapiens
EDVVLRWSQEFSTLTLGQFG

SEQ ID NO: 465 - protein, 20 aa, Homo sapiens
KTLEFAGQDLSAYLLKSLFK

SEQ ID NO: 466 - protein, 20 aa, Homo sapiens
RTISLESLAVILAQLLSLSM

SEQ ID NO: 467 - protein, 20 aa, Homo sapiens
SENITPRMQHDTSHLFTTLG

SEQ ID NO: 468 - protein, 20 aa, Homo sapiens
NFGTRTFQAITVTKLSQKFT

SEQ ID NO: 469 - protein, 20 aa, Homo sapiens
DLRSVFFNFIRNLLSETIFK

SEQ ID NO: 470 - protein, 20 aa, Homo sapiens
SDLQKYALGFQHALSPSTST

SEQ ID NO: 471 - protein, 20 aa, Homo sapiens
QNKPLYFADRLYDSMKGKGT

SEQ ID NO: 472 - protein, 20 aa, Homo sapiens
SEILKEMLAKKHFSYAWPFY

SEQ ID NO: 473 - protein, 20 aa, Homo sapiens
AYFQELTMYRGNTTMDIKDL

SEQ ID NO: 474 - protein, 20 aa, Homo sapiens
KITKQQVFIDVINKLKENVE

SEQ ID NO: 475 - protein, 20 aa, Homo sapiens
RVALATVYFQEEFLDGEHWR

SEQ ID NO: 476 - protein, 20 aa, Homo sapiens
HPSNFIIEAPGHMSDVEWMS

SEQ ID NO: 477 - protein, 20 aa, Homo sapiens
QEKRGAVYERVTTINQEIQK

SEQ ID NO: 478 - protein, 20 aa, Homo sapiens
NKHNELRKAVSPPASNMLKM

SEQ ID NO: 479 - protein, 20 aa, Homo sapiens
AGDSLIAGSAMSKAKKLMTG

SEQ ID NO: 480 - protein, 20 aa, Homo sapiens
VGEVSTPFHIFKVKVTTERE

SEQ ID NO: 481 - protein, 20 aa, Homo sapiens
ENRQLSRLMVGPHAAARNLW

SEQ ID NO: 482 - protein, 20 aa, Homo sapiens
LTERLLKMKDGVAMLEEDVT

SEQ ID NO: 483 - protein, 20 aa, Homo sapiens
PSSETRAFLSPPTLLEGPLR

SEQ ID NO: 484 - protein, 20 aa, Homo sapiens
KSDLRVHMRNLHAYSAAELK

SEQ ID NO: 485 - protein, 20 aa, Homo sapiens
ISDSFLETNVPLLVLIEAAK

SEQ ID NO: 486 - protein, 20 aa, Homo sapiens
RLLRLALAFYGRTADPAERQ

SEQ ID NO: 487 - protein, 20 aa, Homo sapiens
PHSIARQKRILVNLSMVENK

SEQ ID NO: 488 - protein, 20 aa, Homo sapiens
PARSQADKPVLAIQVLGTVK

SEQ ID NO: 489 - protein, 20 aa, Homo sapiens
GSEWSVYAVGSQAHVSFLDP

SEQ ID NO: 490 - protein, 20 aa, Homo sapiens
SRLSPRKTHLLYILRPSRQL

SEQ ID NO: 491 - protein, 20 aa, Homo sapiens
SSQDSGLVSLSSSSPISNKS

SEQ ID NO: 492 - protein, 20 aa, Homo sapiens
ERAEETNTVEVITSAPGAML

SEQ ID NO: 493 - protein, 20 aa, Homo sapiens
QKEITTRYQLDPKFITSILY

SEQ ID NO: 494 - protein, 20 aa, Homo sapiens
PGHQKRIAYSLLGLKDQVNT

SEQ ID NO: 495 - protein, 20 aa, Homo sapiens
RGPTQSVGPTIQDYLNRPRP

SEQ ID NO: 496 - protein, 20 aa, Homo sapiens
LDPMLDFYSDKNAKLTKESY

SEQ ID NO: 497 - protein, 20 aa, Homo sapiens
EEQGATWRHRETLIIAVLVS

SEQ ID NO: 498 - protein, 20 aa, Homo sapiens
WRNSIRSSFISSLSFFLKKM

SEQ ID NO: 499 - protein, 20 aa, Homo sapiens
RRSHRAMRVAHLELATYELA

SEQ ID NO: 500 - protein, 20 aa, Homo sapiens
EEEDTFSSVFHTQIPPEEYE

SEQ ID NO: 501 - protein, 20 aa, Homo sapiens
LSMAFYFNRDDVALENFFRY

SEQ ID NO: 502 - protein, 20 aa, Homo sapiens
WPRPRRYVQPPEMIGPMRPE

SEQ ID NO: 503 - protein, 20 aa, Homo sapiens
LKERDITLRHLLTMREDEFT

SEQ ID NO: 504 - protein, 20 aa, Homo sapiens
FPKNSSFNPAALSRHMSSLS

SEQ ID NO: 505 - protein, 20 aa, Homo sapiens
SMELKFLIIQNAAVFQEAFE

SEQ ID NO: 506 - protein, 20 aa, Homo sapiens
AHSSSAFTITDQVPFSVSVS

SEQ ID NO: 507 - protein, 20 aa, Homo sapiens
EEEKWSHMQTFLQSMSSTDK

SEQ ID NO: 508 - protein, 20 aa, Homo sapiens
EKIKQRLFENLRMLPHAPGV

SEQ ID NO: 509 - protein, 20 aa, Homo sapiens
WTYETSLLVEEAISEELPYS

SEQ ID NO: 510 - protein, 20 aa, Homo sapiens
PNHPSRKKVNFLDMSLDDII

SEQ ID NO: 511 - protein, 20 aa, Homo sapiens
SSDNNTLTSSNAYNSRYWSN

SEQ ID NO: 512 - protein, 20 aa, Homo sapiens
GSETWKTIITKNLHYKDGFD

SEQ ID NO: 513 - protein, 20 aa, Homo sapiens
PYSAVEKAMARLQELLTVSE

SEQ ID NO: 514 - protein, 20 aa, Homo sapiens
EAQDIKFTEEIPLKILAHNN

SEQ ID NO: 515 - protein, 20 aa, Homo sapiens
LLRELDVMNSVIAQLAPEEE

SEQ ID NO: 516 - protein, 20 aa, Homo sapiens
AELVRRILSRDAAPLPRPGA

SEQ ID NO: 517 - protein, 20 aa, Homo sapiens
NLDSARFRYLIGEKLGVHPT

SEQ ID NO: 518 - protein, 20 aa, Homo sapiens
LQGNIILSTEKSKKLKKWPE

SEQ ID NO: 519 - protein, 20 aa, Homo sapiens
GSIPLWLQNFVRILLNEEDM

SEQ ID NO: 520 - protein, 20 aa, Homo sapiens
FPEIFGKASESLQLVFGIDV

SEQ ID NO: 521 - protein, 20 aa, Homo sapiens
DGMEHLIYGEPRKLLTQDWV

SEQ ID NO: 522 - protein, 20 aa, Homo sapiens
EEQEAAFFSSTLNVGTLEEL

SEQ ID NO: 523 - protein, 20 aa, Homo sapiens
QDFFPVIFSKASEYLQLVFG

SEQ ID NO: 524 - protein, 20 aa, Homo sapiens
PDLESEFQAALSRKVAELVH

SEQ ID NO: 525 - protein, 20 aa, Homo sapiens
NKVDELAHFLLRKYRAKELV

SEQ ID NO: 526 - protein, 20 aa, Homo sapiens
AIPTAIDFTLWRQSIKGSSN

SEQ ID NO: 527 - protein, 20 aa, Homo sapiens
PDLESEFQAALSRKVAKLVH

SEQ ID NO: 528 - protein, 20 aa, Homo sapiens
EEQKAASSSSTLIMGTLEEV

SEQ ID NO: 529 - protein, 20 aa, Homo sapiens
QGGASSSISVYYTLWSQFDE

SEQ ID NO: 530 - protein, 20 aa, Homo sapiens
RTTATTFRARSRAPFSRSSH

SEQ ID NO: 531 - protein, 20 aa, Homo sapiens
PLTRKSGSLVQFLLYKYKIK

SEQ ID NO: 532 - protein, 20 aa, Homo sapiens
EERVQAAAMLNDGSSAMGRK

SEQ ID NO: 533 - protein, 20 aa, Homo sapiens
RVAARRGTTAMTSAYSRATS

SEQ ID NO: 534 - protein, 20 aa, Homo sapiens
VRREYKPYFPQILNRTSQHL

SEQ ID NO: 535 - protein, 20 aa, Homo sapiens
ISRYTGYFPVIFRKAREFIE

SEQ ID NO: 536 - protein, 20 aa, Homo sapiens
VFSPSSFSTSSSLILGGPEE

SEQ ID NO: 537 - protein, 20 aa, Homo sapiens
TSVLYFNPWMRIFIQAKRVK

SEQ ID NO: 538 - protein, 20 aa, Homo sapiens
KFSVWVSFFEIYNEYIYDLF

SEQ ID NO: 539 - protein, 20 aa, Homo sapiens
NGGSSLSYTNPAVAAASANL

SEQ ID NO: 540 - protein, 20 aa, Homo sapiens
ELERKFSHQKYLSAPERAHL

SEQ ID NO: 541 - protein, 20 aa, Homo sapiens
MQDPAFVKQAVNLLQEANFH

SEQ ID NO: 542 - protein, 20 aa, Homo sapiens
SSRSVELNGFMAFREQYMGM

SEQ ID NO: 543 - protein, 20 aa, Homo sapiens
IFVNHSTAPYSVKNKLKPGQ

SEQ ID NO: 544 - protein, 20 aa, Homo sapiens
EKNEEIFNYNNHLKNRIYQY

SEQ ID NO: 545 - protein, 20 aa, Homo sapiens
SNLQNNYAHLTNSSINKSGA

SEQ ID NO: 546 - protein, 20 aa, Homo sapiens
ILTIRLTAADHRQLQLSISS

SEQ ID NO: 547 - protein, 20 aa, Homo sapiens
EDSERLMEQQGALLKRLAEA

SEQ ID NO: 548 - protein, 20 aa, Homo sapiens
KASQPSFSIKGRSKLGGFSD

SEQ ID NO: 549 - protein, 20 aa, Homo sapiens
RITHSFRWMAQVLASELSLV

SEQ ID NO: 550 - protein, 20 aa, Homo sapiens
THNRLKSLMKILSEVTPDQS

SEQ ID NO: 551 - protein, 20 aa, Homo sapiens
DGPDVREGIMPTFDLTKVLE

SEQ ID NO: 552 - protein, 20 aa, Homo sapiens
EVNPLYRADPVDLEFSVDQV

SEQ ID NO: 553 - protein, 20 aa, Homo sapiens
IILKVALNMARGLKYLHQEK

SEQ ID NO: 554 - protein, 20 aa, Homo sapiens
DHINRKYAFKAAHPNMRTYY

SEQ ID NO: 555 - protein, 20 aa, Homo sapiens
VTPAMGMQMRKAIMIEVDDR

SEQ ID NO: 556 - protein, 20 aa, Homo sapiens
ESVGLVSMFRGLGIETVSKT

SEQ ID NO: 557 - protein, 20 aa, Homo sapiens
FGERHIFDGNSLLLSRPLKE

SEQ ID NO: 558 - protein, 20 aa, Homo sapiens
ADVSYKVLRNETVLEFMTAL

SEQ ID NO: 559 - protein, 20 aa, Homo sapiens
HFLDISEDWSLHTDDMIGSM

SEQ ID NO: 560 - protein, 20 aa, Homo sapiens
YLGQMINLRRLLLSHIHASS

SEQ ID NO: 561 - protein, 20 aa, Homo sapiens
DNDIALLLLASPIKLDDLKV

SEQ ID NO: 562 - protein, 20 aa, Homo sapiens
EMKTYSVSFDSLFSAVKNFT

SEQ ID NO: 563 - protein, 20 aa, Homo sapiens
ELMDMNIYELIRGRRYPLSE

SEQ ID NO: 564 - protein, 20 aa, Homo sapiens
EEEEDAAWQAEEVLRQQKLA

SEQ ID NO: 565 - protein, 20 aa, Homo sapiens
DQPQPNNVLSTVQPVIIYLT

SEQ ID NO: 566 - protein, 20 aa, Homo sapiens
TDYVEIWQAYLDYLRRRVDF

SEQ ID NO: 567 - protein, 20 aa, Homo sapiens
DKKTQTFLLETPEIYWKLDS

SEQ ID NO: 568 - protein, 20 aa, Homo sapiens
QNEFKKEMAMLQKKIMMETQ

SEQ ID NO: 569 - protein, 20 aa, Homo sapiens
HSFQSAYLIVDRDEAWVLET

SEQ ID NO: 570 - protein, 20 aa, Homo sapiens
LQFVIHSQHQNLRSVIQEME

SEQ ID NO: 571 - protein, 20 aa, Homo sapiens
IIFTTIAFFIYKRRLNENTD

SEQ ID NO: 572 - protein, 20 aa, Homo sapiens
IGEYKQLMRSRRQEMRQFFT

SEQ ID NO: 573 - protein, 20 aa, Homo sapiens
GSKVEDRFYNNHAFEEQEPP

SEQ ID NO: 574 - protein, 20 aa, Homo sapiens
SMKPLLRRAMAYETLEQYGK

SEQ ID NO: 575 - protein, 20 aa, Homo sapiens
RLDSTLRLYHAHTYQHLQDV

SEQ ID NO: 576 - protein, 20 aa, Homo sapiens
TILVVRYRRNVKRTSPEELL

SEQ ID NO: 577 - protein, 20 aa, Homo sapiens
RWSHTRIFQVPSEMTEDIMR

SEQ ID NO: 578 - protein, 20 aa, Homo sapiens
ASIENIIQDIITSLARNEAP

SEQ ID NO: 579 - protein, 20 aa, Homo sapiens
TFGRLHRIIPKIMPKKPAED

SEQ ID NO: 580 - protein, 20 aa, Homo sapiens
AWTHRLRERKQLVIYEEISD

SEQ ID NO: 581 - protein, 20 aa, Homo sapiens
AMTKLGFKAILPSFMRNKRV

SEQ ID NO: 582 - protein, 20 aa, Homo sapiens
TFGSLQRIFPKIMPKKPAEE

SEQ ID NO: 583 - protein, 20 aa, Homo sapiens
EAMTKLGFKATLPPFMRNKR

SEQ ID NO: 584 - protein, 20 aa, Homo sapiens
TNNKKKEFEETAKKVRRAIE

SEQ ID NO: 585 - protein, 20 aa, Homo sapiens
RKAEELLAAAAQRHQQLQQK

SEQ ID NO: 586 - protein, 20 aa, Homo sapiens
LRTLDKKTFYKTADISQMLV

SEQ ID NO: 587 - protein, 20 aa, Homo sapiens
WMDYEFRVIASNILGTGEPS

SEQ ID NO: 588 - protein, 20 aa, Homo sapiens
YRASVLAYASEESVLVGYVD

SEQ ID NO: 589 - protein, 20 aa, Homo sapiens
GFWKSELSYELDRLLTENQN

SEQ ID NO: 590 - protein, 20 aa, Homo sapiens
QADDEPTFSFFSGPYMVMTN

SEQ ID NO: 591 - protein, 20 aa, Homo sapiens
YIEIVMVSETIHFLKNSIAK

SEQ ID NO: 592 - protein, 20 aa, Homo sapiens
MPMSEVSQVSRAAQMAVPSS

SEQ ID NO: 593 - protein, 20 aa, Homo sapiens
FIKHFIIYSIPRYVRDLKIQ

SEQ ID NO: 594 - protein, 20 aa, Homo sapiens
DAGLVKMSRKPRASSPLSNN

SEQ ID NO: 595 - protein, 20 aa, Homo sapiens
LNAERSYKSQISTLHKSVVK

SEQ ID NO: 596 - protein, 20 aa, Homo sapiens
IWRDVIYSVRVGSPWIDQMT

SEQ ID NO: 597 - protein, 20 aa, Homo sapiens
GEEAVLLLDDIMAEVEVVAE

SEQ ID NO: 598 - protein, 20 aa, Homo sapiens
HYYVSMDALLGGSEIWRDID

SEQ ID NO: 599 - protein, 20 aa, Homo sapiens
GAQYRIHTHGVFRGIQDVRR

SEQ ID NO: 600 - protein, 20 aa, Homo sapiens
TAITREEGGPRSGGAQAKLG

SEQ ID NO: 601 - protein, 20 aa, Homo sapiens
EGGTDVKGKILPKAEHFKMP

SEQ ID NO: 602 - protein, 20 aa, Homo sapiens
DLERGTDEAVLQVQAHEHGQ

SEQ ID NO: 603 - protein, 20 aa, Homo sapiens
EVRAGAFEHLPSLRQLDLSH

SEQ ID NO: 604 - protein, 20 aa, Homo sapiens
SPNTLKEIEASAEVSPTTMT

SEQ ID NO: 605 - protein, 20 aa, Homo sapiens
DQLQMSLYASGLLTGVVVDS

SEQ ID NO: 606 - protein, 20 aa, Homo sapiens
SYLVLRPHDVAFLLVYREKS

SEQ ID NO: 607 - protein, 20 aa, Homo sapiens
DSEEKQFSTMRSGFMQNEIT

SEQ ID NO: 608 - protein, 20 aa, Homo sapiens
ASFVHEYSRRHPQLAVSVIL

SEQ ID NO: 609 - protein, 20 aa, Homo sapiens
DDFTASVSEGIMTYANSVVS

SEQ ID NO: 610 - protein, 20 aa, Homo sapiens
QWIAASQFNVPMLYFMGDKD

SEQ ID NO: 611 - protein, 20 aa, Homo sapiens
RKYGKSLYYYIQQDTKGDYQ

SEQ ID NO: 612 - protein, 20 aa, Homo sapiens
EPEDGTALDVHFVSTLEPLS

SEQ ID NO: 613 - protein, 20 aa, Homo sapiens
VGTIDMTLQSDIMTMFENNF

SEQ ID NO: 614 - protein, 20 aa, Homo sapiens
DQSDVLMVDVATSMPVVIKE

SEQ ID NO: 615 - protein, 20 aa, Homo sapiens
NNIENYSTNALIQPVDTISI

SEQ ID NO: 616 - protein, 20 aa, Homo sapiens
ESGSIEYDWNLTSLKKETSP

SEQ ID NO: 617 - protein, 20 aa, Homo sapiens
ELHKRTEIIRSLTKKVKALE

SEQ ID NO: 618 - protein, 20 aa, Homo sapiens
EREKLKSQEIFLNLKTALEK

SEQ ID NO: 619 - protein, 20 aa, Homo sapiens
SPPASNMLKMEWSREVTTNA

SEQ ID NO: 620 - protein, 20 aa, Homo sapiens
TDKTEKVAVDPETVFKRPRE

SEQ ID NO: 621 - protein, 20 aa, Homo sapiens
PNKISTEHQSLVLVKRLLAV

SEQ ID NO: 622 - protein, 20 aa, Homo sapiens
NDHILIENRQLSRLMVGPHA

SEQ ID NO: 623 - protein, 20 aa, Homo sapiens
SKSLKSQVAEAKMTFKRFQA

SEQ ID NO: 624 - protein, 20 aa, Homo sapiens
VGFFAVLFFLWRSFRSVRSR

SEQ ID NO: 625 - protein, 20 aa, Homo sapiens
SAVFHERYALIQHQKTHKNE

SEQ ID NO: 626 - protein, 20 aa, Homo sapiens
KNLMNAVVLTVKASYVASTK

SEQ ID NO: 627 - protein, 20 aa, Homo sapiens
IDESIYFSSDVVTGNVPLKV

SEQ ID NO: 628 - protein, 20 aa, Homo sapiens
KRILVNLSMVENKLVELEHT

SEQ ID NO: 629 - protein, 20 aa, Homo sapiens
NRRKSRRFIPRPPSVAPPPM

SEQ ID NO: 630 - protein, 20 aa, Homo sapiens
EVRLQNETSYSRVLHGYAAQ

SEQ ID NO: 631 - protein, 20 aa, Homo sapiens
LQGFSRLFLKGNLLRGIDSL

SEQ ID NO: 632 - protein, 20 aa, Homo sapiens
NLIAERQRVMAAQVALRRQQ

SEQ ID NO: 633 - protein, 20 aa, Homo sapiens
RKAVTKRARLQRSYEMNERA

SEQ ID NO: 634 - protein, 20 aa, Homo sapiens
KTQNDVDIADVAYYFEKDVK

SEQ ID NO: 635 - protein, 20 aa, Homo sapiens
GLVTSRSFRTASVSINQTEP

SEQ ID NO: 636 - protein, 20 aa, Homo sapiens
KQLENKKTGSKALAEFEEKM

SEQ ID NO: 637 - protein, 20 aa, Homo sapiens
IVKDARLNGSVASYILASHN

SEQ ID NO: 638 - protein, 20 aa, Homo sapiens
EFNVLEMEVMRRQLYAVNRR

SEQ ID NO: 639 - protein, 20 aa, Homo sapiens
RKLFYFKIWAFLDVSFVERI

SEQ ID NO: 640 - protein, 20 aa, Homo sapiens
KAKGRNRRSHRAMRVAHLEL

SEQ ID NO: 641 - protein, 20 aa, Homo sapiens
PVFPQLSRSIISKLLNESET

SEQ ID NO: 642 - protein, 20 aa, Homo sapiens
KNVNQSLLDLYQLAVEKGDP

SEQ ID NO: 643 - protein, 20 aa, Homo sapiens
GWEIGYLDRTSQKLKRLLPI

SEQ ID NO: 644 - protein, 20 aa, Homo sapiens
SSLSHISPFSHSSHMLTTPT

SEQ ID NO: 645 - protein, 20 aa, Homo sapiens
KHINQLLRTMSMPKGRVLDK

SEQ ID NO: 646 - protein, 20 aa, Homo sapiens
LNVSLADTNSLAVVSTQLIM

SEQ ID NO: 647 - protein, 20 aa, Homo sapiens
RNRPGMLVLTPTRELALQVE

SEQ ID NO: 648 - protein, 20 aa, Homo sapiens
FKPVMSKVMEMFQPSAVVLQ

SEQ ID NO: 649 - protein, 20 aa, Homo sapiens
RQQTDMAVNWAGGLHHAKKS

SEQ ID NO: 650 - protein, 20 aa, Homo sapiens
QSYKHLFQPVINQVVDFYQP

SEQ ID NO: 651 - protein, 20 aa, Homo sapiens
SPSRQQSKAHRHRHRRGYSR

SEQ ID NO: 652 - protein, 20 aa, Homo sapiens
LLLSLHGVAASLEVSESPGS

SEQ ID NO: 653 - protein, 20 aa, Homo sapiens
DGFDLNKGIEAKIHTLLPWQ

SEQ ID NO: 654 - protein, 20 aa, Homo sapiens
EGDALRYMIERTVNWQHRAQ

SEQ ID NO: 655 - protein, 20 aa, Homo sapiens
RNIPPHLQWEVLDSLLVQYG

SEQ ID NO: 656 - protein, 20 aa, Homo sapiens
DVGYGRSISSSSSLRRSSKE

SEQ ID NO: 657 - protein, 20 aa, Homo sapiens
SRLLQLHITMPFSSPMEAEL

SEQ ID NO: 658 - protein, 20 aa, Homo sapiens
LKGEMMDLQHGSLFFSTSKI

SEQ ID NO: 659 - protein, 20 aa, Homo sapiens
QTIESWREEGFPVGLKLAVL

SEQ ID NO: 660 - protein, 20 aa, Homo sapiens
TYKIQRLMLKSLTYPERPPL

SEQ ID NO: 661 - protein, 20 aa, Homo sapiens
QSPQGASAFPTTINFTRQRQ

SEQ ID NO: 662 - protein, 20 aa, Homo sapiens
PRAHAEIRKMSLLKFLAKVN

SEQ ID NO: 663 - protein, 20 aa, Homo sapiens
EESFSPTAMDAIFGSLSDEG

SEQ ID NO: 664 - protein, 20 aa, Homo sapiens
DGREDSVFAHPRKLLTQDLV

SEQ ID NO: 665 - protein, 20 aa, Homo sapiens
AISRKMVELVHFLLLKYRAR

SEQ ID NO: 666 - protein, 20 aa, Homo sapiens
KLLTQHFVQENYLEYRQVPG

SEQ ID NO: 667 - protein, 20 aa, Homo sapiens
LLIIVLGTIAMEGDSASEEE

SEQ ID NO: 668 - protein, 20 aa, Homo sapiens
LDTQEEALGLVGVQAATTEE

SEQ ID NO: 669 - protein, 20 aa, Homo sapiens
FPVIFSKASDSLQLVFGIEL

SEQ ID NO: 670 - protein, 20 aa, Homo sapiens
QEALKLKVAELVHFLLHKYR

SEQ ID NO: 671 - protein, 20 aa, Homo sapiens
STESSVKDPVAWEAGMLMHF

SEQ ID NO: 672 - protein, 20 aa, Homo sapiens
KIVGKRFREHFPEILKKASE

SEQ ID NO: 673 - protein, 20 aa, Homo sapiens
TVPSAFQFWYEEALRDEEER

SEQ ID NO: 674 - protein, 20 aa, Homo sapiens
KEVNPTTHSYILVSMLGPND

SEQ ID NO: 675 - protein, 20 aa, Homo sapiens
DEESVSASQKAIIFKRLSKD

SEQ ID NO: 676 - protein, 20 aa, Homo sapiens
PVSPSFSSTLVSLFQSSPER

SEQ ID NO: 677 - protein, 20 aa, Homo sapiens
DSESSFTYTLDEKVAELVEF

SEQ ID NO: 678 - protein, 20 aa, Homo sapiens
STTHSFLFGALAELLDNARD

SEQ ID NO: 679 - protein, 20 aa, Homo sapiens
SSKKTYSLRSQASIIGVNLA

SEQ ID NO: 680 - protein, 20 aa, Homo sapiens
LQRDISEMFLQIYKQGGFLG

SEQ ID NO: 681 - protein, 20 aa, Homo sapiens
AETEPERHLGSYLLDSENTS

SEQ ID NO: 682 - protein, 20 aa, Homo sapiens
RNKSVRYLDLSANVLKDEGL

SEQ ID NO: 683 - protein, 20 aa, Homo sapiens
STWQELILLSSLTVYSKQIF

SEQ ID NO: 684 - protein, 20 aa, Homo sapiens
QMEMLKLTMNKRYNVSQQAL

SEQ ID NO: 685 - protein, 20 aa, Homo sapiens
ITKRSEQIVEFLLIKNANAN

SEQ ID NO: 686 - protein, 20 aa, Homo sapiens
LVFRVDETTPAVVQSVLLER

SEQ ID NO: 687 - protein, 20 aa, Homo sapiens
LELEIIVLNDRVTDLVNQQQ

SEQ ID NO: 688 - protein, 20 aa, Homo sapiens
SPGPRYNVNPKILRTGKDLG

SEQ ID NO: 689 - protein, 20 aa, Homo sapiens
AFSKKWLDLSRSLFYQRWPV

SEQ ID NO: 690 - protein, 20 aa, Homo sapiens
YLLKTKAIVNASEMDIQNVP

SEQ ID NO: 691 - protein, 20 aa, Homo sapiens
ILRTQLLQQLYTSKAVSDEA

SEQ ID NO: 692 - protein, 20 aa, Homo sapiens
VYQKRLMDEAKILKSLHHPN

SEQ ID NO: 693 - protein, 20 aa, Homo sapiens
WQQRQFYNKQSTLPRHSTLS

SEQ ID NO: 694 - protein, 20 aa, Homo sapiens
RRSIAGFVASINEGMTRWFS

SEQ ID NO: 695 - protein, 20 aa, Homo sapiens
KWYSRVVFQMPHQEIVDSLK

SEQ ID NO: 696 - protein, 20 aa, Homo sapiens
LHSWLILYSRSSHREAMSLK

SEQ ID NO: 697 - protein, 20 aa, Homo sapiens
QENPAAFVRAIQQYVDPDVQ

SEQ ID NO: 698 - protein, 20 aa, Homo sapiens
HQAGAQEAQPLQPSHFLDIS

SEQ ID NO: 699 - protein, 20 aa, Homo sapiens
SLLKDEALAIAALELLPREL

SEQ ID NO: 700 - protein, 20 aa, Homo sapiens
GDRSIFEGRTRYSRITGGME

SEQ ID NO: 701 - protein, 20 aa, Homo sapiens
STNEVTRIYNVIGTLRGAVE

SEQ ID NO: 702 - protein, 20 aa, Homo sapiens
VFYEIASLQPLFPGVNELDQ

SEQ ID NO: 703 - protein, 20 aa, Homo sapiens
QQRKKMEKEAQRLMKKEQNK

SEQ ID NO: 704 - protein, 20 aa, Homo sapiens
QSRTDKVLSTAPPQLVHMAA

SEQ ID NO: 705 - protein, 20 aa, Homo sapiens
NAKYANMWLEYYNLERAHGD

SEQ ID NO: 706 - protein, 20 aa, Homo sapiens
MEESNKARAAHSFVVTEFET

SEQ ID NO: 707 - protein, 20 aa, Homo sapiens
KILQQSRIVQSQRLKTIKQL

SEQ ID NO: 708 - protein, 20 aa, Homo sapiens
GETAKEALDVIVSLLEEHGQ

SEQ ID NO: 709 - protein, 20 aa, Homo sapiens
IEETEYVKKIRTTLQKIRTQ

SEQ ID NO: 710 - protein, 20 aa, Homo sapiens
EKSYDISSGLVAIFIAFYGD

SEQ ID NO: 711 - protein, 20 aa, Homo sapiens
SYNHKQIEQLYAAQLASMQV

SEQ ID NO: 712 - protein, 20 aa, Homo sapiens
ISGKEEETSVTILDSSEEDK

SEQ ID NO: 713 - protein, 20 aa, Homo sapiens
SGDYEEAVMYYTRSISALPT

SEQ ID NO: 714 - protein, 20 aa, Homo sapiens
GREVENLILENTQLLETKNA

SEQ ID NO: 715 - protein, 20 aa, Homo sapiens
IDVVESEAVSVLHHWLKKTE

SEQ ID NO: 716 - protein, 20 aa, Homo sapiens
YATKRDIYYTDSQLFGNQTV

SEQ ID NO: 717 - protein, 20 aa, Homo sapiens
HRLRERKQLVIYEEISDPEE

SEQ ID NO: 718 - protein, 20 aa, Homo sapiens
QIPEKIQKAFDDIAKYFSKE

SEQ ID NO: 719 - protein, 20 aa, Homo sapiens
PGKPTTSEKINMISGVLQRY

SEQ ID NO: 720 - protein, 20 aa, Homo sapiens
GKHAWTHRLRERKQLVVYEE

SEQ ID NO: 721 - protein, 20 aa, Homo sapiens
ATLPPFMRNKRVADFQGNDF

SEQ ID NO: 722 - protein, 20 aa, Homo sapiens
AFLSVKKQFEELTLGEFLKL

SEQ ID NO: 723 - protein, 20 aa, Homo sapiens
AEGPSTLDEGLFLRSQEAAA

SEQ ID NO: 724 - protein, 20 aa, Homo sapiens
DEVPDEVENQFILRLPLEHA

SEQ ID NO: 725 - protein, 20 aa, Homo sapiens
NESAVTGYKMLYQNDLHLTP

SEQ ID NO: 726 - protein, 20 aa, Homo sapiens
DKTIQANVLEIISPNLFYAL

SEQ ID NO: 727 - protein, 20 aa, Homo sapiens
DNIKHSQNMRANSIQLREEA

SEQ ID NO: 728 - protein, 20 aa, Homo sapiens
QGFIHRSLSSYAVHIISPGE

SEQ ID NO: 729 - protein, 20 aa, Homo sapiens
VTELEYNYNQFSTLLKNVMS

SEQ ID NO: 730 - protein, 20 aa, Homo sapiens
PKIRDNFWSMPMSEVSQVSR

SEQ ID NO: 731 - protein, 20 aa, Homo sapiens
SFYFWLHTSFIENNRLYLPK

SEQ ID NO: 732 - protein, 20 aa, Homo sapiens
VLGEAWRDQVDWSRLLRDAG

SEQ ID NO: 733 - protein, 20 aa, Homo sapiens
KARQSEADNNTLKLELITAE

SEQ ID NO: 734 - protein, 20 aa, Homo sapiens
DPEAVARRWPWMVSVRANGT

SEQ ID NO: 735 - protein, 20 aa, Homo sapiens
FWANVIANHPQMSALITDED

SEQ ID NO: 736 - protein, 20 aa, Homo sapiens
DSFQDYIKSYLEQASRIWSW

SEQ ID NO: 737 - protein, 20 aa, Homo sapiens
GATLKGVAAGSSSSVKWTEG

SEQ ID NO: 738 - protein, 20 aa, Homo sapiens
WRGRSTYRPRPRRSLQPPEL

SEQ ID NO: 739 - protein, 20 aa, Homo sapiens
GKTFRVSSHLIRHFRIHTGE

SEQ ID NO: 740 - protein, 20 aa, Homo sapiens
LQGLRRLELASNHFLYLPRD

SEQ ID NO: 741 - protein, 20 aa, Homo sapiens
EDVRVSGWLQTEFLSFQDGD

SEQ ID NO: 742 - protein, 20 aa, Homo sapiens
MQRVAPEMFFSPQVFEQPGP

SEQ ID NO: 743 - protein, 20 aa, Homo sapiens
GLGGLRMDSNFDSLPVQITV

SEQ ID NO: 744 - protein, 20 aa, Homo sapiens
LQINDFAYEIKPLAFSTTFE

SEQ ID NO: 745 - protein, 20 aa, Homo sapiens
DLATIFFAQFVQEATYKEVS

SEQ ID NO: 746 - protein, 20 aa, Homo sapiens
NRNVNFAMKSETKLREKMYS

SEQ ID NO: 747 - protein, 20 aa, Homo sapiens
SKGLMVYANQVASDMMVSLM

SEQ ID NO: 748 - protein, 20 aa, Homo sapiens
SDTSGDFRKLMVALAKGRRA

SEQ ID NO: 749 - protein, 20 aa, Homo sapiens
VDAVKLQLPDYYTIIKNPMD

SEQ ID NO: 750 - protein, 20 aa, Homo sapiens
SKPRLVVPYGLKTLLEGISR

SEQ ID NO: 751 - protein, 20 aa, Homo sapiens
YHSLNEELDFLVTSYEEIIE

SEQ ID NO: 752 - protein, 20 aa, Homo sapiens
AISARFKPFSNKGKTLVIQY

SEQ ID NO: 753 - protein, 20 aa, Homo sapiens
DKELNDMVAVHQQQLLSWEE

SEQ ID NO: 754 - protein, 20 aa, Homo sapiens
LKTEENSFKRLMIVKKEKLA

SEQ ID NO: 755 - protein, 20 aa, Homo sapiens
QLQVQREIVNKHNELRKAVS

SEQ ID NO: 756 - protein, 20 aa, Homo sapiens
AMSKAKKLMTGHAIPPSQLD

SEQ ID NO: 757 - protein, 20 aa, Homo sapiens
SNESSMLSTDTKKASILLIR

SEQ ID NO: 758 - protein, 20 aa, Homo sapiens
EEGEQAAGLAAVPRGGSAEE

SEQ ID NO: 759 - protein, 20 aa, Homo sapiens
TELYQENEMKLYRKLIVEEK

SEQ ID NO: 760 - protein, 20 aa, Homo sapiens
SKSLKSQVAEAKMTFKIFQM

SEQ ID NO: 761 - protein, 20 aa, Homo sapiens
NMAFVTSGELVRHRRYKHTH

SEQ ID NO: 762 - protein, 20 aa, Homo sapiens
RGSQKKHISPVQALSEFKAM

SEQ ID NO: 763 - protein, 20 aa, Homo sapiens
VTSINEDNIYISNSIYFSIA

SEQ ID NO: 764 - protein, 20 aa, Homo sapiens
NSTALALVRPSSSGLINSNT

SEQ ID NO: 765 - protein, 20 aa, Homo sapiens
HQTAIKRNNPRKFLRSVGDG

SEQ ID NO: 766 - protein, 20 aa, Homo sapiens
SRVPVYAHITHKALKDIPKE

SEQ ID NO: 767 - protein, 20 aa, Homo sapiens
STLVIPSAAAPIHDADAQES

SEQ ID NO: 768 - protein, 20 aa, Homo sapiens
QSVPQFFTFEDAPSYPEARA

SEQ ID NO: 769 - protein, 20 aa, Homo sapiens
GRLLSADTKGWVRLQFHAGQ

SEQ ID NO: 770 - protein, 20 aa, Homo sapiens
FITSILYENNVITIDLVQNS

SEQ ID NO: 771 - protein, 20 aa, Homo sapiens
AISYRKFTSASDVWSFGIVM

SEQ ID NO: 772 - protein, 20 aa, Homo sapiens
SVDSFQIVLDPMLDFYSDKN

SEQ ID NO: 773 - protein, 20 aa, Homo sapiens
PGTDAVAQTSLEEFNVLEME

SEQ ID NO: 774 - protein, 20 aa, Homo sapiens
MGKRLDYLNLKGARLTVEQG

SEQ ID NO: 775 - protein, 20 aa, Homo sapiens
KRKRKSEMLQKAARGREEHG

SEQ ID NO: 776 - protein, 20 aa, Homo sapiens
KRPSFLDDPLYGISVSLSSE

SEQ ID NO: 777 - protein, 20 aa, Homo sapiens
HFLESHYLHEQVKTIKELGG

SEQ ID NO: 778 - protein, 20 aa, Homo sapiens
HHEIFNLLSFTLNPLEGKLQ

SEQ ID NO: 779 - protein, 20 aa, Homo sapiens
DQPRWVSHHHPAVLNGQHPD

SEQ ID NO: 780 - protein, 20 aa, Homo sapiens
DMVNELFDSLFPVIYTQLMN

SEQ ID NO: 781 - protein, 20 aa, Homo sapiens
VLYRYGSFSVTLDIVQGIES

SEQ ID NO: 782 - protein, 20 aa, Homo sapiens
MSSTDKVIVFVSRKAVADHL

SEQ ID NO: 783 - protein, 20 aa, Homo sapiens
ELLKYHQRVLYIDIDIHHGD

SEQ ID NO: 784 - protein, 20 aa, Homo sapiens
FKPIISKVMEMYQPSAVVLQ

SEQ ID NO: 785 - protein, 20 aa, Homo sapiens
QNSRQYLDQIRQTIFENLKM

SEQ ID NO: 786 - protein, 20 aa, Homo sapiens
GDLVDTQSDLIATQRDLIAT

SEQ ID NO: 787 - protein, 20 aa, Homo sapiens
TGTMPATNVSIFINNTQLSD

SEQ ID NO: 788 - protein, 20 aa, Homo sapiens
EIKVNPPQDFEIVDPGYLGY

SEQ ID NO: 789 - protein, 20 aa, Homo sapiens
IEEIPAYLPNGAALKDSVQR

SEQ ID NO: 790 - protein, 20 aa, Homo sapiens
LDKLNGFQLENFTLKVAYIP

SEQ ID NO: 791 - protein, 20 aa, Homo sapiens
KKNSYHFSAGFGSPIEDKSE

SEQ ID NO: 792 - protein, 20 aa, Homo sapiens
GARRPDSRLLQLHITMPFSS

SEQ ID NO: 793 - protein, 20 aa, Homo sapiens
SILKNLRRVHPVSTMVKGLY

SEQ ID NO: 794 - protein, 20 aa, Homo sapiens
LSTEKSKKLKKWPEASTTKR

SEQ ID NO: 795 - protein, 20 aa, Homo sapiens
SRGATTFIYNRAVKNTRKVA

SEQ ID NO: 796 - protein, 20 aa, Homo sapiens
ITKKVADLVGFLLLKYRARE

SEQ ID NO: 797 - protein, 20 aa, Homo sapiens
QDRIATTDDTTAMASASSSA

SEQ ID NO: 798 - protein, 20 aa, Homo sapiens
GSVIKNYEDYFPEIFREASV

SEQ ID NO: 799 - protein, 20 aa, Homo sapiens
KASEYLQLVFGIEVVEVVRI

SEQ ID NO: 800 - protein, 20 aa, Homo sapiens
SKASEYLQLVFGIEVVEVVP

SEQ ID NO: 801 - protein, 20 aa, Homo sapiens
EEQEAASSSSTLVEVTLGEV

SEQ ID NO: 802 - protein, 20 aa, Homo sapiens
ATEEQEAASSSSTLVEVTLG

SEQ ID NO: 803 - protein, 20 aa, Homo sapiens
VRVNARVRISYPSLHEEALG

SEQ ID NO: 804 - protein, 20 aa, Homo sapiens
VGKEHMFYGEPRKLLTQDWV

SEQ ID NO: 805 - protein, 20 aa, Homo sapiens
MHFILRKYKMREPIMKADML

SEQ ID NO: 806 - protein, 20 aa, Homo sapiens
ESLLSSWDFPRRKLLMPLLG

SEQ ID NO: 807 - protein, 20 aa, Homo sapiens
VQFLMEMYKMKKPIMKADML

SEQ ID NO: 808 - protein, 20 aa, Homo sapiens
FPEIFRKVSQRTELVFGLAL

SEQ ID NO: 809 - protein, 20 aa, Homo sapiens
DSSGESYTLVSKLGLPSEGI

SEQ ID NO: 810 - protein, 20 aa, Homo sapiens
EFLAMLKNTVPITFPSSYKD

SEQ ID NO: 811 - protein, 20 aa, Homo sapiens
PRELLTKVWVQGHYLEYREV

SEQ ID NO: 812 - protein, 20 aa, Homo sapiens
EKPLNSFQYQRRQAMGIPFI

SEQ ID NO: 813 - protein, 20 aa, Homo sapiens
RAKRKLYTSEISSPIDISGQ

SEQ ID NO: 814 - protein, 20 aa, Homo sapiens
TSPQLSTGVSFFFLSFHISN

SEQ ID NO: 815 - protein, 20 aa, Homo sapiens
TETQVKIWFQNRRYKTKRKQ

SEQ ID NO: 816 - protein, 20 aa, Homo sapiens
STTSVYSSFVFNLFTPEGAE

SEQ ID NO: 817 - protein, 20 aa, Homo sapiens
RSLDPQSYSLIHQLLSAEDL

SEQ ID NO: 818 - protein, 20 aa, Homo sapiens
DNEWNYTRAGQAFTMLQTEG

SEQ ID NO: 819 - protein, 20 aa, Homo sapiens
SSEIVGMLLQQNVDVFAADI

SEQ ID NO: 820 - protein, 20 aa, Homo sapiens
DDMYIVQKYISNPLLIGRYK

SEQ ID NO: 821 - protein, 20 aa, Homo sapiens
ATSAQNIEFLQVIAKREEAI

SEQ ID NO: 822 - protein, 20 aa, Homo sapiens
PAAYRQTDVRVTKFKAPQYT

SEQ ID NO: 823 - protein, 20 aa, Homo sapiens
NIWIFELERNVSIPIGWSYF

SEQ ID NO: 824 - protein, 20 aa, Homo sapiens
NNVVLEAPFLVGIEGSLKGS

SEQ ID NO: 825 - protein, 20 aa, Homo sapiens
RADPVDLEFSVDQVDSVDQE

SEQ ID NO: 826 - protein, 20 aa, Homo sapiens
FDDEAYYAALGTRPPINMEE

SEQ ID NO: 827 - protein, 20 aa, Homo sapiens
SQEIEMHADNPAAIQTVVLQ

SEQ ID NO: 828 - protein, 20 aa, Homo sapiens
IYTRRNYEAANSLIQNLFKV

SEQ ID NO: 829 - protein, 20 aa, Homo sapiens
AASIRRTDGGLFLLADVSHK

SEQ ID NO: 830 - protein, 20 aa, Homo sapiens
KKKAIQLYRHGTSLEIWLGY

SEQ ID NO: 831 - protein, 20 aa, Homo sapiens
SNKAKAFDGAILFLSQKLEE

SEQ ID NO: 832 - protein, 20 aa, Homo sapiens
QLTTLSFYGNSISISALQSL

SEQ ID NO: 833 - protein, 20 aa, Homo sapiens
EAEVGEFPWQVSIQARSEPF

SEQ ID NO: 834 - protein, 20 aa, Homo sapiens
SFDSLFSAVKNFTEIASKFS

SEQ ID NO: 835 - protein, 20 aa, Homo sapiens
KRRGPAYVMELPKLKLSGVV

SEQ ID NO: 836 - protein, 20 aa, Homo sapiens
IRKTQKIVIKKREPLNFGIP

SEQ ID NO: 837 - protein, 20 aa, Homo sapiens
PAPDNVLLTLRPRRINMTDT

SEQ ID NO: 838 - protein, 20 aa, Homo sapiens
APRLAEYQAYIDFEMKIGDP

SEQ ID NO: 839 - protein, 20 aa, Homo sapiens
HDLEIQLTAITTSEQYYSKE

SEQ ID NO: 840 - protein, 20 aa, Homo sapiens
RLKTIKQLYEQFIKSMEELE

SEQ ID NO: 841 - protein, 20 aa, Homo sapiens
NTREPAAEIEALLGMDLVRL

SEQ ID NO: 842 - protein, 20 aa, Homo sapiens
EAGAAALRNVAQRLFENYQT

SEQ ID NO: 843 - protein, 20 aa, Homo sapiens
DFQKEYQLKTIEKLALEKSY

SEQ ID NO: 844 - protein, 20 aa, Homo sapiens
AAQLASMQVSPGAKMPSTPQ

SEQ ID NO: 845 - protein, 20 aa, Homo sapiens
SNTHYRIPQGFGNLLEGLTR

SEQ ID NO: 846 - protein, 20 aa, Homo sapiens
TPNNHFTLEDIQALKRQYEL

SEQ ID NO: 847 - protein, 20 aa, Homo sapiens
STAHSRIRKERPISLGIFPL

SEQ ID NO: 848 - protein, 20 aa, Homo sapiens
HLSKSDLLANQSQEVLEERT

SEQ ID NO: 849 - protein, 20 aa, Homo sapiens
RSSWENIKFEDSVGLQMVSH

SEQ ID NO: 850 - protein, 20 aa, Homo sapiens
GKHAWTHRLRERKQLVIYEE

SEQ ID NO: 851 - protein, 20 aa, Homo sapiens
GFKAILPSFMRNKRVTDFQG

SEQ ID NO: 852 - protein, 20 aa, Homo sapiens
ISEKLRKAFDDIAKYFSKKE

SEQ ID NO: 853 - protein, 20 aa, Homo sapiens
HRVRERKQLVIYEEISDPQE

SEQ ID NO: 854 - protein, 20 aa, Homo sapiens
MGQHKDLWDFHMPERLAKEI

SEQ ID NO: 855 - protein, 20 aa, Homo sapiens
DADSSAQAAAQAPENFQEGK

SEQ ID NO: 856 - protein, 20 aa, Homo sapiens
AAVALVSSSAWSSALGSQTT

SEQ ID NO: 857 - protein, 20 aa, Homo sapiens
IMLLKNFMLNQNVMLSVKGI

SEQ ID NO: 858 - protein, 20 aa, Homo sapiens
LVNEVFTIDDTLQTLKLRLR

SEQ ID NO: 859 - protein, 20 aa, Homo sapiens
LLQISDALRYLHFQGFIHRS

SEQ ID NO: 860 - protein, 20 aa, Homo sapiens
KDLRRHKIYGRKRRLTSQDS

SEQ ID NO: 861 - protein, 20 aa, Homo sapiens
EDIPEISRLSISQKLPSTTM

SEQ ID NO: 862 - protein, 20 aa, Homo sapiens
ERRQQYFSDLFNILDTAIIV

SEQ ID NO: 863 - protein, 20 aa, Homo sapiens
SEIELLRSQMANERISMQNL

SEQ ID NO: 864 - protein, 20 aa, Homo sapiens
SDVPVLQVIMHSRYRAQRFW

SEQ ID NO: 865 - protein, 20 aa, Homo sapiens
DRRGAVIQSVPGFWANVIAN

SEQ ID NO: 866 - protein, 20 aa, Homo sapiens
EKDKFFAYLTLAKHTISSDY

SEQ ID NO: 867 - protein, 20 aa, Homo sapiens
TGSQALLLRTPYSSDNLYQM

SEQ ID NO: 868 - protein, 20 aa, Homo sapiens
GKAFRHSSKLARHQRIHTGE

SEQ ID NO: 869 - protein, 20 aa, Homo sapiens
FSGSNASVSAPSPLVELILN

SEQ ID NO: 870 - protein, 20 aa, Homo sapiens
SQPVSILSPNTLKEIEASAE

SEQ ID NO: 871 - protein, 20 aa, Homo sapiens
IERGRILNWEGVQYLWSFVL

SEQ ID NO: 872 - protein, 20 aa, Homo sapiens
QDFAKYIEMHVIVEKQLYNH

SEQ ID NO: 873 - protein, 20 aa, Homo sapiens
SKHLPVFTYTDQGAILEDQP

SEQ ID NO: 874 - protein, 20 aa, Homo sapiens
YKEVSKMVKDALTAIEKPTG

SEQ ID NO: 875 - protein, 20 aa, Homo sapiens
KQLQAVLQWVAASELNVPIL

SEQ ID NO: 876 - protein, 20 aa, Homo sapiens
KQLQAVLQWIAASQFNVPML

SEQ ID NO: 877 - protein, 20 aa, Homo sapiens
PKWISIMTERSVPHLQKVFD

SEQ ID NO: 878 - protein, 20 aa, Homo sapiens
LKAVHQQLQVLSQVPFRKLN

SEQ ID NO: 879 - protein, 20 aa, Homo sapiens
TMYRGNTTMDIKDLVKQFHQ

SEQ ID NO: 880 - protein, 20 aa, Homo sapiens
EKVSDIMLQKLKSLHLKKKT

SEQ ID NO: 881 - protein, 20 aa, Homo sapiens
DSRFGHFRLSSGKFYGHKEK

SEQ ID NO: 882 - protein, 20 aa, Homo sapiens
SRQMVTDLELSTLLPISHEN

SEQ ID NO: 883 - protein, 20 aa, Homo sapiens
KSSADKMQQLNAAHQEALMK

SEQ ID NO: 884 - protein, 20 aa, Homo sapiens
PASNMLKMEWSREVTTNAQR

SEQ ID NO: 885 - protein, 20 aa, Homo sapiens
SQIDDFTGFSKDRMMQKPGS

SEQ ID NO: 886 - protein, 20 aa, Homo sapiens
KKASILLIRKIYILMQNLGP

SEQ ID NO: 887 - protein, 20 aa, Homo sapiens
DSGPDSSDVVPAAEVVGVAG

SEQ ID NO: 888 - protein, 20 aa, Homo sapiens
LEGERNQIYIQLSEVDKTKE

SEQ ID NO: 889 - protein, 20 aa, Homo sapiens
LLEKDPYALDVPNTAFGREH

SEQ ID NO: 890 - protein, 20 aa, Homo sapiens
MSGDERSDEIVLTVSNSNVE

SEQ ID NO: 891 - protein, 20 aa, Homo sapiens
FGKEMVKLNYVAARRQQELK

SEQ ID NO: 892 - protein, 20 aa, Homo sapiens
GYVPQVDDIVNVVMVESIQF

SEQ ID NO: 893 - protein, 20 aa, Homo sapiens
SMVENKLVELEHTLLSKGFR

SEQ ID NO: 894 - protein, 20 aa, Homo sapiens
VLGTVKWFNVRNGYGFINRN

SEQ ID NO: 895 - protein, 20 aa, Homo sapiens
HKDWIFSIAWISDTMAVSGS

SEQ ID NO: 896 - protein, 20 aa, Homo sapiens
VAFWIIKLPRRRSHQDALEG

SEQ ID NO: 897 - protein, 20 aa, Homo sapiens
SSQYRMHSYYPPPSYLGQSV

SEQ ID NO: 898 - protein, 20 aa, Homo sapiens
QQLGLSTNGKKIEVYLRLHR

SEQ ID NO: 899 - protein, 20 aa, Homo sapiens
VDEKAPEFSMQGLKAGVIAV

SEQ ID NO: 900 - protein, 20 aa, Homo sapiens
KETFNLYYAESDLDYGTNFQ

SEQ ID NO: 901 - protein, 20 aa, Homo sapiens
NLTWDQVITLDQVLDEVIPI

SEQ ID NO: 902 - protein, 20 aa, Homo sapiens
TRPKKMGSQLPKPRMLRESG

SEQ ID NO: 903 - protein, 20 aa, Homo sapiens
RKWNQMMYSAELWRYRTITF

SEQ ID NO: 904 - protein, 20 aa, Homo sapiens
RSLFWRSEPADDLQRQDNRV

SEQ ID NO: 905 - protein, 20 aa, Homo sapiens
AIQKMKKLDKILAKKQRREK

SEQ ID NO: 906 - protein, 20 aa, Homo sapiens
LSDDKMEHAQKLMRLQNLRG

SEQ ID NO: 907 - protein, 20 aa, Homo sapiens
MAASALRGLPVAGGGESSES

SEQ ID NO: 908 - protein, 20 aa, Homo sapiens
GLYHKMNGQNRPLIKPKRRL

SEQ ID NO: 909 - protein, 20 aa, Homo sapiens
VLLGLFSTIHDSIQYVQKNA

SEQ ID NO: 910 - protein, 20 aa, Homo sapiens
SQKRSFVYVWKTWGQYWQVL

SEQ ID NO: 911 - protein, 20 aa, Homo sapiens
PKASTWVVASRRSSTVSRAP

SEQ ID NO: 912 - protein, 20 aa, Homo sapiens
TKYHSDDYIKFLRSIRPDNM

SEQ ID NO: 913 - protein, 20 aa, Homo sapiens
EMTKYHSDEYIKFLRSIRPD

SEQ ID NO: 914 - protein, 20 aa, Homo sapiens
SEELPYSEYFEYFAPDFTLH

SEQ ID NO: 915 - protein, 20 aa, Homo sapiens
PSQKPSGFKSGQHPLNGQPL

SEQ ID NO: 916 - protein, 20 aa, Homo sapiens
IALILGAFFYWRSKNKEEEE

SEQ ID NO: 917 - protein, 20 aa, Homo sapiens
IREDDTTLVTATVENETYTL

SEQ ID NO: 918 - protein, 20 aa, Homo sapiens
ESYNEWALNVNEALEAKINK

SEQ ID NO: 919 - protein, 20 aa, Homo sapiens
QDTDTKITISPLQELTLYNP

SEQ ID NO: 920 - protein, 20 aa, Homo sapiens
VIDLMFHPGGLMKLRSREAD

SEQ ID NO: 921 - protein, 20 aa, Homo sapiens
REGAGRMRVVGWGLGSASPE

SEQ ID NO: 922 - protein, 20 aa, Homo sapiens
QSAYEIIKLKGYTSWAIGLS

SEQ ID NO: 923 - protein, 20 aa, Homo sapiens
LGFSPGPILPSTRKLYEKKL

SEQ ID NO: 924 - protein, 20 aa, Homo sapiens
DLFIPRIETILMMYTRNNLN

SEQ ID NO: 925 - protein, 20 aa, Homo sapiens
VQAATSSSSPLVLGTLEEVP

SEQ ID NO: 926 - protein, 20 aa, Homo sapiens
KLLTQDWVQENYLEYRQVPG

SEQ ID NO: 927 - protein, 20 aa, Homo sapiens
VKGLITKAEMLGSVIKNYED

SEQ ID NO: 928 - protein, 20 aa, Homo sapiens
ETSFQVALSRKMAELVHFLL

SEQ ID NO: 929 - protein, 20 aa, Homo sapiens
FAHPRKLLMQDLVQENYLEY

SEQ ID NO: 930 - protein, 20 aa, Homo sapiens
APEEKIWEELSVLEVFEGRE

SEQ ID NO: 931 - protein, 20 aa, Homo sapiens
PVIFGKASESLKMIFGIDVK

SEQ ID NO: 932 - protein, 20 aa, Homo sapiens
GGPRISYPLLHEWALREGEE

SEQ ID NO: 933 - protein, 20 aa, Homo sapiens
LRKLLTQEWVQENYLEYRQA

SEQ ID NO: 934 - protein, 20 aa, Homo sapiens
KLKVAELVHFLLHKYRVKEP

SEQ ID NO: 935 - protein, 20 aa, Homo sapiens
EERAQVRSSVRARRRTTATT

SEQ ID NO: 936 - protein, 20 aa, Homo sapiens
QRAPTTAAAAAAGVSSTKSK

SEQ ID NO: 937 - protein, 20 aa, Homo sapiens
IEKKQSFSQGLSSTVQSRTD

SEQ ID NO: 938 - protein, 20 aa, Homo sapiens
NQSSAWTLPRNGLLMPLLSV

SEQ ID NO: 939 - protein, 20 aa, Homo sapiens
IYDGILHSIYGDARKIITED

SEQ ID NO: 940 - protein, 20 aa, Homo sapiens
SLLQIPMTSSFSSTLLSIFQ

SEQ ID NO: 941 - protein, 20 aa, Homo sapiens
MIVIKYKDYFPVILKRAREF

SEQ ID NO: 942 - protein, 20 aa, Homo sapiens
EEESLSEVVVPMPSWLIRTR

SEQ ID NO: 943 - protein, 20 aa, Homo sapiens
QKFGDFLQHSPSILQSKAKK

SEQ ID NO: 944 - protein, 20 aa, Homo sapiens
TSASGSASGSASTLVHNGTS

SEQ ID NO: 945 - protein, 20 aa, Homo sapiens
PTPSKPLTSFLIQDILRDGA

SEQ ID NO: 946 - protein, 20 aa, Homo sapiens
MMAWSDNKIFRDRFLYTFYF

SEQ ID NO: 947 - protein, 20 aa, Homo sapiens
RLADELLFRQIAWIKKLPFF

SEQ ID NO: 948 - protein, 20 aa, Homo sapiens
FPKLLRLDGRELSAPVIVDI

SEQ ID NO: 949 - protein, 20 aa, Homo sapiens
PKKPSAFKPAIEMQNSVPNK

SEQ ID NO: 950 - protein, 20 aa, Homo sapiens
PNDYTKFVAEYFQERQMLGT

SEQ ID NO: 951 - protein, 20 aa, Homo sapiens
KLVEAEMDGAAAAKQVMALK

SEQ ID NO: 952 - protein, 20 aa, Homo sapiens
MGPNTVGKASQPSFSIKGRS

SEQ ID NO: 953 - protein, 20 aa, Homo sapiens
AFILLLVVAFSKKWLDLSRS

SEQ ID NO: 954 - protein, 20 aa, Homo sapiens
LKEKIVLTHNRLKSLMKILS

SEQ ID NO: 955 - protein, 20 aa, Homo sapiens
EQLEERTWLLHDAIQNQQNA

SEQ ID NO: 956 - protein, 20 aa, Homo sapiens
NMARGLKYLHQEKKLLHGDI

SEQ ID NO: 957 - protein, 20 aa, Homo sapiens
DLNLEWISLPRSWTYGITRG

SEQ ID NO: 958 - protein, 20 aa, Homo sapiens
YNPLMEARRLRSALLFQHED

SEQ ID NO: 959 - protein, 20 aa, Homo sapiens
LVGNIVITRYNNRTYRIDDV

SEQ ID NO: 960 - protein, 20 aa, Homo sapiens
GSEGTVVQLLANHFRVISRP

SEQ ID NO: 961 - protein, 20 aa, Homo sapiens
QYAHKLTFLVAQSIHKEPSL

SEQ ID NO: 962 - protein, 20 aa, Homo sapiens
ETFKAVLDGLDVLLAQEVRP

SEQ ID NO: 963 - protein, 20 aa, Homo sapiens
FEGRTRYSRITGGMEAEVGE

SEQ ID NO: 964 - protein, 20 aa, Homo sapiens
KYADKIYSISMKHPQEMKTY

SEQ ID NO: 965 - protein, 20 aa, Homo sapiens
YDPDERIAAHQALQHPYFQE

SEQ ID NO: 966 - protein, 20 aa, Homo sapiens
ISSTITRDLYVTATHSVHEE

SEQ ID NO: 967 - protein, 20 aa, Homo sapiens
EKVHSLFRRQLAIPLYDMEA

SEQ ID NO: 968 - protein, 20 aa, Homo sapiens
EQEQSSLRASLEIELSNLKA

SEQ ID NO: 969 - protein, 20 aa, Homo sapiens
NLLTGAQNEFKKEMAMLQKK

SEQ ID NO: 970 - protein, 20 aa, Homo sapiens
DQEQGRKLRSTMLELEKQGL

SEQ ID NO: 971 - protein, 20 aa, Homo sapiens
ERKLSLENKLLQLKSSATYG

SEQ ID NO: 972 - protein, 20 aa, Homo sapiens
DRKKVIWFVASSFLIGLGSL

SEQ ID NO: 973 - protein, 20 aa, Homo sapiens
EDAEGSKAMNGSAAKLQQYY

SEQ ID NO: 974 - protein, 20 aa, Homo sapiens
SIPFSNTHYRIPQGFGNLLE

SEQ ID NO: 975 - protein, 20 aa, Homo sapiens
EPAGSEIADDLSILYSNRAA

SEQ ID NO: 976 - protein, 20 aa, Homo sapiens
DEEVVKELMPLVVAVLENLD

SEQ ID NO: 977 - protein, 20 aa, Homo sapiens
EMTEDIMRDRIEQVRRSISR

SEQ ID NO: 978 - protein, 20 aa, Homo sapiens
PTGGSRLASSSEVLASIENI

SEQ ID NO: 979 - protein, 20 aa, Homo sapiens
EKRSKAFDDIATYFSKKEWK

SEQ ID NO: 980 - protein, 20 aa, Homo sapiens
MNGDDAFARRPTVGAQIPEK

SEQ ID NO: 981 - protein, 20 aa, Homo sapiens
MNGDDTFARRPTVGAQIPEK

SEQ ID NO: 982 - protein, 20 aa, Homo sapiens
VTLPPFMRSKRAADFHGNDF

SEQ ID NO: 983 - protein, 20 aa, Homo sapiens
KYFSEKEWEKMKASEKIIYV

SEQ ID NO: 984 - protein, 20 aa, Homo sapiens
VHLKEILSKKQETLRILRLH

SEQ ID NO: 985 - protein, 20 aa, Homo sapiens
NEGTSSIVMEIQKQIEKKEK

SEQ ID NO: 986 - protein, 20 aa, Homo sapiens
VSREAILRFGFLQEFSKEER

SEQ ID NO: 987 - protein, 20 aa, Homo sapiens
LGVTKEIAIWAERIMFSDLR

SEQ ID NO: 988 - protein, 20 aa, Homo sapiens
TILPTLRSALFSRYSPHDWD

SEQ ID NO: 989 - protein, 20 aa, Homo sapiens
PPSLNYIPPVLQLSGGQKPD

SEQ ID NO: 990 - protein, 20 aa, Homo sapiens
YGLEHIFFDAAKNLVWKERT

SEQ ID NO: 991 - protein, 20 aa, Homo sapiens
RPKRFYLEYYNNNRTTPVWP

SEQ ID NO: 992 - protein, 20 aa, Homo sapiens
IALFFLMDVLLRVFVERRQQ

SEQ ID NO: 993 - protein, 20 aa, Homo sapiens
RRQLDETNDELAQIARERDI

SEQ ID NO: 994 - protein, 20 aa, Homo sapiens
KSEAPPIYLQVSSYQHWIWD

SEQ ID NO: 995 - protein, 20 aa, Homo sapiens
HHNSSLNFFNWFSDHNFAGS

SEQ ID NO: 996 - protein, 20 aa, Homo sapiens
KHTISSDYVIPIGTYGQMKN

SEQ ID NO: 997 - protein, 20 aa, Homo sapiens
IQDVRRVPGVAPTLVRSASE

SEQ ID NO: 998 - protein, 20 aa, Homo sapiens
FKWNSDFINHQIIYAGEKNH

SEQ ID NO: 999 - protein, 20 aa, Homo sapiens
LRHLDLSNNSLVSLTYVSFR

SEQ ID NO: 1000 - protein, 20 aa, Homo sapiens
PWPERLSNNVEELLQSSLSL

SEQ ID NO: 1001 - protein, 20 aa, Homo sapiens
LYPGFTKRLFRELMGDHVSS

SEQ ID NO: 1002 - protein, 20 aa, Homo sapiens
IFVSFNITIILSSLELWIDE

SEQ ID NO: 1003 - protein, 20 aa, Homo sapiens
QKQSSYVGWWIHFRIVEIVV

SEQ ID NO: 1004 - protein, 20 aa, Homo sapiens
KLSQKFTKVNFTEIQKLVLD

SEQ ID NO: 1005 - protein, 20 aa, Homo sapiens
DAMLRKLYNVMFAKKVPEHV

SEQ ID NO: 1006 - protein, 20 aa, Homo sapiens
MTDSDFVSAVKRNLFNQWKQ

SEQ ID NO: 1007 - protein, 20 aa, Homo sapiens
RYKSYSPYDMLESIRKEVKG

SEQ ID NO: 1008 - protein, 20 aa, Homo sapiens
PSRQTAIIVNPPPPEYINTK

SEQ ID NO: 1009 - protein, 20 aa, Homo sapiens
EVPAQLLDAEGAIKIGSEKS

SEQ ID NO: 1010 - protein, 20 aa, Homo sapiens
ADQRLAISHSQIAHLEERNK

SEQ ID NO: 1011 - protein, 20 aa, Homo sapiens
TQYDLSEFENIGAIGLELWQ

SEQ ID NO: 1012 - protein, 20 aa, Homo sapiens
VEWMSIFKPSKMQRIVRLKS

SEQ ID NO: 1013 - protein, 20 aa, Homo sapiens
EKTKRLNELKLSVVSLKEIQ

SEQ ID NO: 1014 - protein, 20 aa, Homo sapiens
ALLARKQGAGDSLIAGSAMS

SEQ ID NO: 1015 - protein, 20 aa, Homo sapiens
ESPDLSISHSQVEQLVNKTS

SEQ ID NO: 1016 - protein, 20 aa, Homo sapiens
LKEFEKTIHFYQKKIILHEK

SEQ ID NO: 1017 - protein, 20 aa, Homo sapiens
TLEGERNQIYIQLSEVDKTK

SEQ ID NO: 1018 - protein, 20 aa, Homo sapiens
TLQTVHFTSEAVELQDMSLL

SEQ ID NO: 1019 - protein, 20 aa, Homo sapiens
LVYDGVRDIRKAVLMIRTPE

SEQ ID NO: 1020 - protein, 20 aa, Homo sapiens
QQGLPQGDTQLTTVQGVVTS

SEQ ID NO: 1021 - protein, 20 aa, Homo sapiens
TDNNLAVYDLSRDILNNFPH

SEQ ID NO: 1022 - protein, 20 aa, Homo sapiens
VPPPRFRPRYRRPFRPRPRQ

SEQ ID NO: 1023 - protein, 20 aa, Homo sapiens
ERGSGIRSVSFYEHIITVGT

SEQ ID NO: 1024 - protein, 20 aa, Homo sapiens
PRMEEKEALVPIQKATDSFH

SEQ ID NO: 1025 - protein, 20 aa, Homo sapiens
ASEGRMVIQDIPAVTSRGHV

SEQ ID NO: 1026 - protein, 20 aa, Homo sapiens
KIEVYLRLHRHAYPEQRQDM

SEQ ID NO: 1027 - protein, 20 aa, Homo sapiens
TVNGEQLDLDPGQTLIYYVD

SEQ ID NO: 1028 - protein, 20 aa, Homo sapiens
DLEPHMNYTFTVEARNGVSG

SEQ ID NO: 1029 - protein, 20 aa, Homo sapiens
AKLTKESYPVVVAESMYGDF

SEQ ID NO: 1030 - protein, 20 aa, Homo sapiens
LQEYAGNFQGIRFHYDRNPG

SEQ ID NO: 1031 - protein, 20 aa, Homo sapiens
QILDSLSYMRNENVISELNI

SEQ ID NO: 1032 - protein, 20 aa, Homo sapiens
ESLKMRVSKPFGMLMLSIWI

SEQ ID NO: 1033 - protein, 20 aa, Homo sapiens
ILKQKSIIKLSSERKKEDIE

SEQ ID NO: 1034 - protein, 20 aa, Homo sapiens
HEQVKTIKELGGYVSNLRKI

SEQ ID NO: 1035 - protein, 20 aa, Homo sapiens
DENGYTALTWAARQGHKNIV

SEQ ID NO: 1036 - protein, 20 aa, Homo sapiens
KLESSHSRGSMTALGGASSS

SEQ ID NO: 1037 - protein, 20 aa, Homo sapiens
YYPEDLFIDKKVLKVAHVEH

SEQ ID NO: 1038 - protein, 20 aa, Homo sapiens
SYTWDFGDSSGTLISRALVV

SEQ ID NO: 1039 - protein, 20 aa, Homo sapiens
KALENFKTGKVRILIATDLA

SEQ ID NO: 1040 - protein, 20 aa, Homo sapiens
QRLFENLRMLPHAPGVQMQA

SEQ ID NO: 1041 - protein, 20 aa, Homo sapiens
YGLYKKMIVFKPYQASQHDM

SEQ ID NO: 1042 - protein, 20 aa, Homo sapiens
NHHSERSRNHLERSLSQSDR

SEQ ID NO: 1043 - protein, 20 aa, Homo sapiens
RKPRPPHTHSYTISHATLER

SEQ ID NO: 1044 - protein, 20 aa, Homo sapiens
TNGSEVQSSWAETTYWISPQ

SEQ ID NO: 1045 - protein, 20 aa, Homo sapiens
GEARLREMEALQSLRLANEG

SEQ ID NO: 1046 - protein, 20 aa, Homo sapiens
QVNTDSETAVVNVTYSSKDQ

SEQ ID NO: 1047 - protein, 20 aa, Homo sapiens
THEDKIVRRNATMIFGILAS

SEQ ID NO: 1048 - protein, 20 aa, Homo sapiens
VLKDFTVSGNLLFMSVRDQD

SEQ ID NO: 1049 - protein, 20 aa, Homo sapiens
GETRLALVQRNVAIMKSIIP

SEQ ID NO: 1050 - protein, 20 aa, Homo sapiens
LDGAQDSDDSEELNIILQGN

SEQ ID NO: 1051 - protein, 20 aa, Homo sapiens
DGSFSFKLLNQLGMIEEPRL

SEQ ID NO: 1052 - protein, 20 aa, Homo sapiens
APEEEIWEELSVMEVYDGRE

SEQ ID NO: 1053 - protein, 20 aa, Homo sapiens
DPARYEFLWGPRAHAEIRKM

SEQ ID NO: 1054 - protein, 20 aa, Homo sapiens
REDSGDFGLQVSTMFSEDDF

SEQ ID NO: 1055 - protein, 20 aa, Homo sapiens
EEQETASSSSTLVEVTLREV

SEQ ID NO: 1056 - protein, 20 aa, Homo sapiens
EEQQTASSSSTLVEVTLGEV

SEQ ID NO: 1057 - protein, 20 aa, Homo sapiens
SEFQAALSRKVAELVHFLLL

SEQ ID NO: 1058 - protein, 20 aa, Homo sapiens
DGREHTVYGEPRKLLTQDWV

SEQ ID NO: 1059 - protein, 20 aa, Homo sapiens
GSDPVRYEFLWGPRALAETS

SEQ ID NO: 1060 - protein, 20 aa, Homo sapiens
ETSYEKVINYLVMLNAREPI

SEQ ID NO: 1061 - protein, 20 aa, Homo sapiens
PRAYAETTKMKVLEFLAKMN

SEQ ID NO: 1062 - protein, 20 aa, Homo sapiens
KASEGLSVVFGLELNKVNPN

SEQ ID NO: 1063 - protein, 20 aa, Homo sapiens
FWAKVNKTVPSAFQFWYEEA

SEQ ID NO: 1064 - protein, 20 aa, Homo sapiens
DTTPNNFPLLYEEALRDEEE

SEQ ID NO: 1065 - protein, 20 aa, Homo sapiens
PHLYEDALIDEVERALRLRA

SEQ ID NO: 1066 - protein, 20 aa, Homo sapiens
IESEPLFTYTLDEKVDELAR

SEQ ID NO: 1067 - protein, 20 aa, Homo sapiens
KKKVLEFLAKLNNTVPSSFP

SEQ ID NO: 1068 - protein, 20 aa, Homo sapiens
EKQRELKTARTLSLFYGVNV

SEQ ID NO: 1069 - protein, 20 aa, Homo sapiens
KKIIETMSSSKLSNVEASKE

SEQ ID NO: 1070 - protein, 20 aa, Homo sapiens
AASRYNLTISDVSVSDVPFP

SEQ ID NO: 1071 - protein, 20 aa, Homo sapiens
EAFSRASLVSVYNSYPYYPY

SEQ ID NO: 1072 - protein, 20 aa, Homo sapiens
KFKEHLKQMTLQLELKQIPW

SEQ ID NO: 1073 - protein, 20 aa, Homo sapiens
LLSSTWQELILLSSLTVYSK

SEQ ID NO: 1074 - protein, 20 aa, Homo sapiens
SETLKHLVLQFLQQYYSIYD

SEQ ID NO: 1075 - protein, 20 aa, Homo sapiens
AQRKSKSLKINLNYAGDALR

SEQ ID NO: 1076 - protein, 20 aa, Homo sapiens
LVKRKLVHDIIDLIYLNGLR

SEQ ID NO: 1077 - protein, 20 aa, Homo sapiens
SMQNYVQFLKSSYANVFGDG

SEQ ID NO: 1078 - protein, 20 aa, Homo sapiens
SISARTKAFRVDSTPGPAAY

SEQ ID NO: 1079 - protein, 20 aa, Homo sapiens
DLSRSLFYQRWPVDVSNRIH

SEQ ID NO: 1080 - protein, 20 aa, Homo sapiens
SMEWDTQVVKGSSPLGPAGL

SEQ ID NO: 1081 - protein, 20 aa, Homo sapiens
SQGQRGHTSMKAVYVEPAAA

SEQ ID NO: 1082 - protein, 20 aa, Homo sapiens
MQKLGFGTGVNVYLMKRSPR

SEQ ID NO: 1083 - protein, 20 aa, Homo sapiens
LHKEKYTLEQALLSASQEIE

SEQ ID NO: 1084 - protein, 20 aa, Homo sapiens
VGQSIHREPNLSLSNRLYYL

SEQ ID NO: 1085 - protein, 20 aa, Homo sapiens
HFWALFYPKRAMDQARELVN

SEQ ID NO: 1086 - protein, 20 aa, Homo sapiens
SREIRELPLLNAMPLHSWLI

SEQ ID NO: 1087 - protein, 20 aa, Homo sapiens
QHKLSLWPGFAISVSYFERK

SEQ ID NO: 1088 - protein, 20 aa, Homo sapiens
LQALYVDSLFFLRGRLDQLL

SEQ ID NO: 1089 - protein, 20 aa, Homo sapiens
LTSPSMEIKEVASIILHKDF

SEQ ID NO: 1090 - protein, 20 aa, Homo sapiens
KRQIYVAAFTVQAAAETLSE

SEQ ID NO: 1091 - protein, 20 aa, Homo sapiens
NILMLHEVVFDRKSGSLALI

SEQ ID NO: 1092 - protein, 20 aa, Homo sapiens
SQPTPDNVLSAVTPELINLA

SEQ ID NO: 1093 - protein, 20 aa, Homo sapiens
QVISVTFEKALNAGFIQATD

SEQ ID NO: 1094 - protein, 20 aa, Homo sapiens
KDKRDYLWTSAKNTLSTPLP

SEQ ID NO: 1095 - protein, 20 aa, Homo sapiens
QEEKILNMFRQQQKILQQSR

SEQ ID NO: 1096 - protein, 20 aa, Homo sapiens
DRDEAWVLETIGKYWAAEKV

SEQ ID NO: 1097 - protein, 20 aa, Homo sapiens
KKIRTTLQKIRTQMFKDEIR

SEQ ID NO: 1098 - protein, 20 aa, Homo sapiens
DISSGLVAIFIAFYGDRKKV

SEQ ID NO: 1099 - protein, 20 aa, Homo sapiens
QEMRQFFTVGQQPQIPITTG

SEQ ID NO: 1100 - protein, 20 aa, Homo sapiens
REILREQPDNIPAFAAAYFE

SEQ ID NO: 1101 - protein, 20 aa, Homo sapiens
YLSKAERFKMMLTLISKGQK

SEQ ID NO: 1102 - protein, 20 aa, Homo sapiens
AQRKRFTRVEMARVLMERNQ

SEQ ID NO: 1103 - protein, 20 aa, Homo sapiens
EVLEERTRIQFIRWSHTRIF

SEQ ID NO: 1104 - protein, 20 aa, Homo sapiens
SSDYLSRVYLPNKLKFGGWI

SEQ ID NO: 1105 - protein, 20 aa, Homo sapiens
SYVYMKRNYKAMTKLGFKVT

SEQ ID NO: 1106 - protein, 20 aa, Homo sapiens
WEKMKASEKIFYVYMKRKYE

SEQ ID NO: 1107 - protein, 20 aa, Homo sapiens
FGRLQGIFPKIMPKKPAEEG

SEQ ID NO: 1108 - protein, 20 aa, Homo sapiens
EVMTKLGFKVTLPPFMRSKR

SEQ ID NO: 1109 - protein, 20 aa, Homo sapiens
RGKHAWTHRVRERKQLVIYE

SEQ ID NO: 1110 - protein, 20 aa, Homo sapiens
KERISALNLQIEEEKNKQRQ

SEQ ID NO: 1111 - protein, 20 aa, Homo sapiens
KQKNEKLISLQEQLQRFLKK

SEQ ID NO: 1112 - protein, 20 aa, Homo sapiens
QALAPDFRLNPVRRLIPAAR

SEQ ID NO: 1113 - protein, 20 aa, Homo sapiens
SEDDQWYRASVLAYASEESV

SEQ ID NO: 1114 - protein, 20 aa, Homo sapiens
IMLLERSIMAKEGPLKVAQT

SEQ ID NO: 1115 - protein, 20 aa, Homo sapiens
KDRTMNLQDIRYILKNDLKD

SEQ ID NO: 1116 - protein, 20 aa, Homo sapiens
ALKSRISWEGLLALDNGEME

SEQ ID NO: 1117 - protein, 20 aa, Homo sapiens
KPKPHVSDHNRLLHLARPKA

SEQ ID NO: 1118 - protein, 20 aa, Homo sapiens
DSKLYIPLEYRSISLAIALF

SEQ ID NO: 1119 - protein, 20 aa, Homo sapiens
DDERMEQMSNMTLMKETIST

SEQ ID NO: 1120 - protein, 20 aa, Homo sapiens
RGQRPRTSAPSRAGALLLLL

SEQ ID NO: 1121 - protein, 20 aa, Homo sapiens
ESEQAALGEEAVLLLDDIMA

SEQ ID NO: 1122 - protein, 20 aa, Homo sapiens
KSYLEQASRIWSWLLGAAMV

SEQ ID NO: 1123 - protein, 20 aa, Homo sapiens
LLLRTPYSSDNLYQMTSQLE

SEQ ID NO: 1124 - protein, 20 aa, Homo sapiens
KIESQRIISGRISGYISEAS

SEQ ID NO: 1125 - protein, 20 aa, Homo sapiens
AYPEKMRNRVLLELNSADLD

SEQ ID NO: 1126 - protein, 20 aa, Homo sapiens
DENSYWRNQNPGSLLQLPHT

SEQ ID NO: 1127 - protein, 20 aa, Homo sapiens
HPDTFSYPIERGRILNWEGV

SEQ ID NO: 1128 - protein, 20 aa, Homo sapiens
DVAFLLVYREKSNYVGATFQ

SEQ ID NO: 1129 - protein, 20 aa, Homo sapiens
LFGLEIWTNKNLIVVDDVRK

SEQ ID NO: 1130 - protein, 20 aa, Homo sapiens
QLAVSVILRVAKGYQELLEK

SEQ ID NO: 1131 - protein, 20 aa, Homo sapiens
LMTDTQFVSAVKRTVFSHGS

SEQ ID NO: 1132 - protein, 20 aa, Homo sapiens
KEFADSISKGLMVYANQVAS

SEQ ID NO: 1133 - protein, 20 aa, Homo sapiens
EVDMLKIRSEFKRKYGKSLY

SEQ ID NO: 1134 - protein, 20 aa, Homo sapiens
DEIEIDFETLKASTLRELEK

SEQ ID NO: 1135 - protein, 20 aa, Homo sapiens
EYSDKTTQFPSVYAVPGTEQ

SEQ ID NO: 1136 - protein, 20 aa, Homo sapiens
KNKSVSQYLEMDKTLSKKEE

SEQ ID NO: 1137 - protein, 20 aa, Homo sapiens
NIGAIGLELWQVRSGTIFDN

SEQ ID NO: 1138 - protein, 20 aa, Homo sapiens
LHNLRQIYVKQQSDLQFLNF

SEQ ID NO: 1139 - protein, 20 aa, Homo sapiens
KNDLYPNPKPEVLHMIYMRA

SEQ ID NO: 1140 - protein, 20 aa, Homo sapiens
MMQKPGSNAPVGGNVTSSFS

SEQ ID NO: 1141 - protein, 20 aa, Homo sapiens
ISTEHQSLVLVKRLLAVSVS

SEQ ID NO: 1142 - protein, 20 aa, Homo sapiens
PPWEQDYRMMFPPPGQSYPD

SEQ ID NO: 1143 - protein, 20 aa, Homo sapiens
SVRSRLYVGREKKLALMLSG

SEQ ID NO: 1144 - protein, 20 aa, Homo sapiens
DSKLAVSLAETTGLIKLEEE

SEQ ID NO: 1145 - protein, 20 aa, Homo sapiens
NAVVLTVKASYVASTKYQKV

SEQ ID NO: 1146 - protein, 20 aa, Homo sapiens
FIWRAISITPVHKSSSGFQD

SEQ ID NO: 1147 - protein, 20 aa, Homo sapiens
LEHTLLSKGFRGASPHRKST

SEQ ID NO: 1148 - protein, 20 aa, Homo sapiens
PQRPRNRPYFQRRRQQAPGP

SEQ ID NO: 1149 - protein, 20 aa, Homo sapiens
VVDVQTSQITKIPILKDREP

SEQ ID NO: 1150 - protein, 20 aa, Homo sapiens
LEGGHWLSEKRHRLQAIRDG

SEQ ID NO: 1151 - protein, 20 aa, Homo sapiens
PPSYLGQSVPQFFTFEDAPS

SEQ ID NO: 1152 - protein, 20 aa, Homo sapiens
SRKRKAVTKRARLQRSYEMN

SEQ ID NO: 1153 - protein, 20 aa, Homo sapiens
DSKSLRTALQKEITTRYQLD

SEQ ID NO: 1154 - protein, 20 aa, Homo sapiens
RARRPKFADIVSILDKLIRA

SEQ ID NO: 1155 - protein, 20 aa, Homo sapiens
SRFFIDFPHIEEQQKKIESY

SEQ ID NO: 1156 - protein, 20 aa, Homo sapiens
LVIAEMMELGSRSRGASQKK

SEQ ID NO: 1157 - protein, 20 aa, Homo sapiens
EDYFSHHLAVYNSPQFKKTM

SEQ ID NO: 1158 - protein, 20 aa, Homo sapiens
EMENTKKFLSLTAVSEETVG

SEQ ID NO: 1159 - protein, 20 aa, Homo sapiens
DKMEHAQKLMRLQNLRGGHI

SEQ ID NO: 1160 - protein, 20 aa, Homo sapiens
GHLITAVQNVITELPVNSQK

SEQ ID NO: 1161 - protein, 20 aa, Homo sapiens
QGNHVPPYYGNSVRATVQRY

SEQ ID NO: 1162 - protein, 20 aa, Homo sapiens
KMEEKYQLTARLNMEQLLQS

SEQ ID NO: 1163 - protein, 20 aa, Homo sapiens
MEVTVYHRRGSRSYVPLAHS

SEQ ID NO: 1164 - protein, 20 aa, Homo sapiens
LMPGFIHLVLQPSLKGQRNR

SEQ ID NO: 1165 - protein, 20 aa, Homo sapiens
PYNDYFEYFGPDFKLHISPS

SEQ ID NO: 1166 - protein, 20 aa, Homo sapiens
SPTNMQGFTKSLNAFNVGDD

SEQ ID NO: 1167 - protein, 20 aa, Homo sapiens
EVSESPGSIQVARGQPAVLP

SEQ ID NO: 1168 - protein, 20 aa, Homo sapiens
TVEYELKYRNIGSETWKTII

SEQ ID NO: 1169 - protein, 20 aa, Homo sapiens
FKSDYFNMPVHMVPTELVEK

SEQ ID NO: 1170 - protein, 20 aa, Homo sapiens
QFEQSETETVHLFIPALSVG

SEQ ID NO: 1171 - protein, 20 aa, Homo sapiens
AAYNKLLNNNLSLKYSQTGY

SEQ ID NO: 1172 - protein, 20 aa, Homo sapiens
ITMPFSSPMEAELVRRILSR

SEQ ID NO: 1173 - protein, 20 aa, Homo sapiens
WKNIHKQVIQSAYEIIKLKG

SEQ ID NO: 1174 - protein, 20 aa, Homo sapiens
AARAPSTRITYGTITKERDY

SEQ ID NO: 1175 - protein, 20 aa, Homo sapiens
NFNTQKKTVWLIHGYRPVGS

SEQ ID NO: 1176 - protein, 20 aa, Homo sapiens
SDPARYEFLWGPRALAETSY

SEQ ID NO: 1177 - protein, 20 aa, Homo sapiens
GSDPRSFPLWYEEALKDEEE

SEQ ID NO: 1178 - protein, 20 aa, Homo sapiens
LLTQNWVQEKYLVYRQVPGT

SEQ ID NO: 1179 - protein, 20 aa, Homo sapiens
AREPFTKAEMLGSVIRNFQD

SEQ ID NO: 1180 - protein, 20 aa, Homo sapiens
APEEKIWEELSMLEVFEGRE

SEQ ID NO: 1181 - protein, 20 aa, Homo sapiens
KASSSLQLVFGIELMEVDPI

SEQ ID NO: 1182 - protein, 20 aa, Homo sapiens
PRALAETSYVKVLEHVVRVN

SEQ ID NO: 1183 - protein, 20 aa, Homo sapiens
RKVAKLVHFLLLKYRAREPV

SEQ ID NO: 1184 - protein, 20 aa, Homo sapiens
VAELVRFLLRKYQIKEPVTK

SEQ ID NO: 1185 - protein, 20 aa, Homo sapiens
NYKRYFPVIFGKASEFMQVI

SEQ ID NO: 1186 - protein, 20 aa, Homo sapiens
DHFTEILNGASRRLELVFGL

SEQ ID NO: 1187 - protein, 20 aa, Homo sapiens
TKGEMLKIVGKRFREHFPEI

SEQ ID NO: 1188 - protein, 20 aa, Homo sapiens
ILKKASFNMEVVFGVDLKKV

SEQ ID NO: 1189 - protein, 20 aa, Homo sapiens
EPTTKAEMLKIISKKYKEHF

SEQ ID NO: 1190 - protein, 20 aa, Homo sapiens
EYKPYFPQILNRTSQHLVVA

SEQ ID NO: 1191 - protein, 20 aa, Homo sapiens
PVSSSFSYTLLSLFQSSPER

SEQ ID NO: 1192 - protein, 20 aa, Homo sapiens
EEPVTEAEMLMIVIKYKDYF

SEQ ID NO: 1193 - protein, 20 aa, Homo sapiens
RAQLRLDFIHANSTTHSFLF

SEQ ID NO: 1194 - protein, 20 aa, Homo sapiens
EENIGILPRTLNVLFDSLQE

SEQ ID NO: 1195 - protein, 20 aa, Homo sapiens
TDYYQELQRDISEMFLQIYK

SEQ ID NO: 1196 - protein, 20 aa, Homo sapiens
HQKYLSAPERAHLAKNLKLT

SEQ ID NO: 1197 - protein, 20 aa, Homo sapiens
SFFSDFGLMWYLEELKKEEF

SEQ ID NO: 1198 - protein, 20 aa, Homo sapiens
SDEGMEVIERLIYLYHKFHQ

SEQ ID NO: 1199 - protein, 20 aa, Homo sapiens
PSLSQEQQEMVQAFSAQSGM

SEQ ID NO: 1200 - protein, 20 aa, Homo sapiens
QLKVLIAENTMLTSKLKEKQ

SEQ ID NO: 1201 - protein, 20 aa, Homo sapiens
STQSQALGSLRTTTPAFTLN

SEQ ID NO: 1202 - protein, 20 aa, Homo sapiens
KNYEGMIDNYKSQVMKTRLE

SEQ ID NO: 1203 - protein, 20 aa, Homo sapiens
TKYVFDSAPSHSISARTKAF

SEQ ID NO: 1204 - protein, 20 aa, Homo sapiens
STLMLFPINIWIFELERNVS

SEQ ID NO: 1205 - protein, 20 aa, Homo sapiens
DQASFTTSMEWDTQVVKGSS

SEQ ID NO: 1206 - protein, 20 aa, Homo sapiens
TSNSEAISSSSIPQFPITSD

SEQ ID NO: 1207 - protein, 20 aa, Homo sapiens
NDHYRSVYQKRLMDEAKILK

SEQ ID NO: 1208 - protein, 20 aa, Homo sapiens
RSVPAGLTLQSVSPQSLQGK

SEQ ID NO: 1209 - protein, 20 aa, Homo sapiens
LQFYNIIFRRLLKIMNLQQI

SEQ ID NO: 1210 - protein, 20 aa, Homo sapiens
RTDGGLFLLADVSHKVIRND

SEQ ID NO: 1211 - protein, 20 aa, Homo sapiens
KKMSTYLKTISPNNFTLAFI

SEQ ID NO: 1212 - protein, 20 aa, Homo sapiens
VAGSMGFNVDYPKIIKVQEN

SEQ ID NO: 1213 - protein, 20 aa, Homo sapiens
SISISALQSLLQHLIGLSNL

SEQ ID NO: 1214 - protein, 20 aa, Homo sapiens
LYSEELFPEELSVVLGTNDL

SEQ ID NO: 1215 - protein, 20 aa, Homo sapiens
RPFYRHVIYAPSSHNKYAGE

SEQ ID NO: 1216 - protein, 20 aa, Homo sapiens
VYSKQPYTEYISTRWYRAPE

SEQ ID NO: 1217 - protein, 20 aa, Homo sapiens
NVLSGLINMAGASIPAMSSR

SEQ ID NO: 1218 - protein, 20 aa, Homo sapiens
RTRRKVLSRAVAAATYKTMG

SEQ ID NO: 1219 - protein, 20 aa, Homo sapiens
GAIRKMREDRWAVIAKMDRK

SEQ ID NO: 1220 - protein, 20 aa, Homo sapiens
LQKKIMMETQQQEIASVRKS

SEQ ID NO: 1221 - protein, 20 aa, Homo sapiens
EIEALLGMDLVRLGLERGET

SEQ ID NO: 1222 - protein, 20 aa, Homo sapiens
EKEKRTLLERKLSLENKLLQ

SEQ ID NO: 1223 - protein, 20 aa, Homo sapiens
PGSTRIKARKRKQLHFFDSR

SEQ ID NO: 1224 - protein, 20 aa, Homo sapiens
EGSDQHVASHLPLHPIMHNK

SEQ ID NO: 1225 - protein, 20 aa, Homo sapiens
GKYSAAIALLEPAGSEIADD

SEQ ID NO: 1226 - protein, 20 aa, Homo sapiens
KTRDGGSVVGASVFYKDVAG

SEQ ID NO: 1227 - protein, 20 aa, Homo sapiens
QDIHVTRDVVKHHLSKSDLL

SEQ ID NO: 1228 - protein, 20 aa, Homo sapiens
ADSKMKAEIQALTFLSSDYL

SEQ ID NO: 1229 - protein, 20 aa, Homo sapiens
AFDDIATYFSKKEWKKMKYS

SEQ ID NO: 1230 - protein, 20 aa, Homo sapiens
PNRGNQVERPQMTFGRLQGI

SEQ ID NO: 1231 - protein, 20 aa, Homo sapiens
AQIPEKIQKAFDDIAKYFSK

SEQ ID NO: 1232 - protein, 20 aa, Homo sapiens
WEKMKSSEKIVYVYMKLNYE

SEQ ID NO: 1233 - protein, 20 aa, Homo sapiens
NGDDAFVRRPRVGSQIPEKM

SEQ ID NO: 1234 - protein, 20 aa, Homo sapiens
KIEDLMEMVQKLQKVGSLEP

SEQ ID NO: 1235 - protein, 20 aa, Homo sapiens
KDKLKIDLLPDGRHAVVEVE

SEQ ID NO: 1236 - protein, 20 aa, Homo sapiens
TDGRHFVSQTTGNLYIARTN

SEQ ID NO: 1237 - protein, 20 aa, Homo sapiens
TADELRMISSTFLNLPFQGI

SEQ ID NO: 1238 - protein, 20 aa, Homo sapiens
LQVRGAEASRLWASRLTDDS

SEQ ID NO: 1239 - protein, 20 aa, Homo sapiens
LVYERITIGTLFSVLHERRS

SEQ ID NO: 1240 - protein, 20 aa, Homo sapiens
KQRFRGMLWFDLSLLPELVQ

SEQ ID NO: 1241 - protein, 20 aa, Homo sapiens
PSTTMTKARKRRRRRRLMEL

SEQ ID NO: 1242 - protein, 20 aa, Homo sapiens
MDVLLRVFVERRQQYFSDLF

SEQ ID NO: 1243 - protein, 20 aa, Homo sapiens
DKKSENIASLGESLAMKEKT

SEQ ID NO: 1244 - protein, 20 aa, Homo sapiens
IDQMTQTASDVPVLQVIMHS

SEQ ID NO: 1245 - protein, 20 aa, Homo sapiens
TPESAPEELLAVQVELEPVN

SEQ ID NO: 1246 - protein, 20 aa, Homo sapiens
FLLHHAFVDSIFEQWLRRHR

SEQ ID NO: 1247 - protein, 20 aa, Homo sapiens
ELVRHHNMHQRNMTKLQLAL

SEQ ID NO: 1248 - protein, 20 aa, Homo sapiens
GRAFSQSSNLSQHQRIHMRE

SEQ ID NO: 1249 - protein, 20 aa, Homo sapiens
AFARRPPLAELAALNLSGSR

SEQ ID NO: 1250 - protein, 20 aa, Homo sapiens
LQNETYSALSPGKSEDVVLR

SEQ ID NO: 1251 - protein, 20 aa, Homo sapiens
SNTYQLPDGSRVELTPMQRV

SEQ ID NO: 1252 - protein, 20 aa, Homo sapiens
VILAQLLSLSMGITYDDINK

SEQ ID NO: 1253 - protein, 20 aa, Homo sapiens
PFGGQKHIIHIKVKKLLFSK

SEQ ID NO: 1254 - protein, 20 aa, Homo sapiens
LQTMKQEFLINLVKQKPQIT

SEQ ID NO: 1255 - protein, 20 aa, Homo sapiens
YDSDSWAEDLIVSALLLIQY

SEQ ID NO: 1256 - protein, 20 aa, Homo sapiens
DIMEAMLKRLVSALIGEEKE

SEQ ID NO: 1257 - protein, 20 aa, Homo sapiens
AQRQDIAFAYQRRTKKELAS

SEQ ID NO: 1258 - protein, 20 aa, Homo sapiens
PNHHQLAFNYQELEHLQTVK

SEQ ID NO: 1259 - protein, 20 aa, Homo sapiens
PAQLAAQMLGKVSSIHSDQS

SEQ ID NO: 1260 - protein, 20 aa, Homo sapiens
SDEAKSIRDVPTLLGAKLDK

SEQ ID NO: 1261 - protein, 20 aa, Homo sapiens
QDWEKHFLDASTSKQSDWNG

SEQ ID NO: 1262 - protein, 20 aa, Homo sapiens
TSKLQRLLAESRQMVTDLEL

SEQ ID NO: 1263 - protein, 20 aa, Homo sapiens
MIVKKEKLATAQFKINKKHE

SEQ ID NO: 1264 - protein, 20 aa, Homo sapiens
AQLQRTPMSALVFPNKISTE

SEQ ID NO: 1265 - protein, 20 aa, Homo sapiens
VAEAKMTFKRFQANEERLEI

SEQ ID NO: 1266 - protein, 20 aa, Homo sapiens
MAATEISVLSEQFTKIKELE

SEQ ID NO: 1267 - protein, 20 aa, Homo sapiens
ADMADVMRLLSHLKIVEEAL

SEQ ID NO: 1268 - protein, 20 aa, Homo sapiens
VEEDKPHYGLRAIKVDVVPR

SEQ ID NO: 1269 - protein, 20 aa, Homo sapiens
SGLINSNTDNNLAVYDLSRD

SEQ ID NO: 1270 - protein, 20 aa, Homo sapiens
VPVKGSRYAPNRRKSRRFIP

SEQ ID NO: 1271 - protein, 20 aa, Homo sapiens
FHLWKAENTLSKLLSTKLPY

SEQ ID NO: 1272 - protein, 20 aa, Homo sapiens
KMTDNKTGEVLISENVVASI

SEQ ID NO: 1273 - protein, 20 aa, Homo sapiens
TYYSSFYQPSLFPYYNNLYN

SEQ ID NO: 1274 - protein, 20 aa, Homo sapiens
VRTYWIIIELKHKAREKPYD

SEQ ID NO: 1275 - protein, 20 aa, Homo sapiens
PPQQSRVWKYEVTYRKKGDS

SEQ ID NO: 1276 - protein, 20 aa, Homo sapiens
EQQKKIESYLHNHFIGEGMT

SEQ ID NO: 1277 - protein, 20 aa, Homo sapiens
PNTKAEMEMSLAEELNHGRQ

SEQ ID NO: 1278 - protein, 20 aa, Homo sapiens
FERIMKYERLARILLQEIPI

SEQ ID NO: 1279 - protein, 20 aa, Homo sapiens
PVKGYELAVTQHQQLAEIDI

SEQ ID NO: 1280 - protein, 20 aa, Homo sapiens
EAGLAEYLFDKLTLGGRVKE

SEQ ID NO: 1281 - protein, 20 aa, Homo sapiens
EKDHIFSSYTAFGDLEVFLH

SEQ ID NO: 1282 - protein, 20 aa, Homo sapiens
SSFNPAALSRHMSSLSHISP

SEQ ID NO: 1283 - protein, 20 aa, Homo sapiens
ARRDLKVFGNFPKLIMTQVS

SEQ ID NO: 1284 - protein, 20 aa, Homo sapiens
SLIYRRRLMKQDFSVPQLPH

SEQ ID NO: 1285 - protein, 20 aa, Homo sapiens
IKNIQSTTNTTIQIIQEQPE

SEQ ID NO: 1286 - protein, 20 aa, Homo sapiens
TYETAVALDTEIPNELPYND

SEQ ID NO: 1287 - protein, 20 aa, Homo sapiens
LDQIRQTIFENLKMLNHAPS

SEQ ID NO: 1288 - protein, 20 aa, Homo sapiens
LGQSFSFHSGNANIPSIYAN

SEQ ID NO: 1289 - protein, 20 aa, Homo sapiens
VNGSSENKPIRSSYFTFQLQ

SEQ ID NO: 1290 - protein, 20 aa, Homo sapiens
SIPVHLNSLPRLETLVAEVQ

SEQ ID NO: 1291 - protein, 20 aa, Homo sapiens
EEVKLEAHIRVPSFAAGRVI

SEQ ID NO: 1292 - protein, 20 aa, Homo sapiens
LQEPSDLRAVLLINSKSYVS

SEQ ID NO: 1293 - protein, 20 aa, Homo sapiens
EALFKKSAETLWNIQKDLIF

SEQ ID NO: 1294 - protein, 20 aa, Homo sapiens
LQEVKILAQFYNDFVNISSI

SEQ ID NO: 1295 - protein, 20 aa, Homo sapiens
AREPVTKAEMLESVIKNYKH

SEQ ID NO: 1296 - protein, 20 aa, Homo sapiens
LVQFLLFKYQMKEPITKAEI

SEQ ID NO: 1297 - protein, 20 aa, Homo sapiens
TVRPADLTRVIMPLEQRSQH

SEQ ID NO: 1298 - protein, 20 aa, Homo sapiens
PRKLLTQDLVQENYLEYRQV

SEQ ID NO: 1299 - protein, 20 aa, Homo sapiens
EEGPRMFPDLESEFQAAISR

SEQ ID NO: 1300 - protein, 20 aa, Homo sapiens
GSVVGNWQYFFPVIFSKASS

SEQ ID NO: 1301 - protein, 20 aa, Homo sapiens
GSNPARYEFLWGPRALAETS

SEQ ID NO: 1302 - protein, 20 aa, Homo sapiens
KASDSLQLVFGIELMEVDPI

SEQ ID NO: 1303 - protein, 20 aa, Homo sapiens
AEMLESVIKNYKRYFPVIFG

SEQ ID NO: 1304 - protein, 20 aa, Homo sapiens
LNGASRRLELVFGLDLKEDN

SEQ ID NO: 1305 - protein, 20 aa, Homo sapiens
NSATEEEIWEFLNMLGVYDG

SEQ ID NO: 1306 - protein, 20 aa, Homo sapiens
EPRKLITQDLVKLKYLEYRQ

SEQ ID NO: 1307 - protein, 20 aa, Homo sapiens
LNMLGIYDGKRHLIFGEPRK

SEQ ID NO: 1308 - protein, 20 aa, Homo sapiens
ARKIITEDLVQDKYVVYRQV

SEQ ID NO: 1309 - protein, 20 aa, Homo sapiens
KQPITKAEMLTNVISRYTGY

SEQ ID NO: 1310 - protein, 20 aa, Homo sapiens
PHSSPPYYEFLWGPRAHSES

SEQ ID NO: 1311 - protein, 20 aa, Homo sapiens
LKSGSMRIGKDFILFTKKEE

SEQ ID NO: 1312 - protein, 20 aa, Homo sapiens
QKWREERDQLVAALEIQLKA

SEQ ID NO: 1313 - protein, 20 aa, Homo sapiens
DNRPALGSTAPPVHNVTSAS

SEQ ID NO: 1314 - protein, 20 aa, Homo sapiens
AFSHTQVIELERKFSHQKYL

SEQ ID NO: 1315 - protein, 20 aa, Homo sapiens
FKDPKRAMEAFNLVRESEQL

SEQ ID NO: 1316 - protein, 20 aa, Homo sapiens
PSPGSTLSSSRSVELNGFMA

SEQ ID NO: 1317 - protein, 20 aa, Homo sapiens
TMNKRYNVSQQALDLQNLRF

SEQ ID NO: 1318 - protein, 20 aa, Homo sapiens
IEVHNKASLTPLLLSITKRS

SEQ ID NO: 1319 - protein, 20 aa, Homo sapiens
SDFKDFIFDDMYIVQKYISN

SEQ ID NO: 1320 - protein, 20 aa, Homo sapiens
FKLENERLKASFAPMEDKLN

SEQ ID NO: 1321 - protein, 20 aa, Homo sapiens
RTGKDLGPAYSILGRYQTKT

SEQ ID NO: 1322 - protein, 20 aa, Homo sapiens
YFNHKSFWSLILSHPSGAVS

SEQ ID NO: 1323 - protein, 20 aa, Homo sapiens
IVNASEMDIQNVPLSEKIAE

SEQ ID NO: 1324 - protein, 20 aa, Homo sapiens
SIPQFPITSDSTISTLETPQ

SEQ ID NO: 1325 - protein, 20 aa, Homo sapiens
MDEAKILKSLHHPNIVGYRA

SEQ ID NO: 1326 - protein, 20 aa, Homo sapiens
YNVTSDYAVHPMSPVGRTSR

SEQ ID NO: 1327 - protein, 20 aa, Homo sapiens
RDWGLSFDSNLLSFSGRILQ

SEQ ID NO: 1328 - protein, 20 aa, Homo sapiens
RINLKNTSFITSQELNWVKE

SEQ ID NO: 1329 - protein, 20 aa, Homo sapiens
DVSHKLLRIETAYDFIKRTS

SEQ ID NO: 1330 - protein, 20 aa, Homo sapiens
PGFAISVSYFERKLLFSADV

SEQ ID NO: 1331 - protein, 20 aa, Homo sapiens
KLPTLAKFSPYLGQMINLRR

SEQ ID NO: 1332 - protein, 20 aa, Homo sapiens
LVNYNLWIEKVTQLEGRPFN

SEQ ID NO: 1333 - protein, 20 aa, Homo sapiens
LKKEGWRPRRTILFASWDAE

SEQ ID NO: 1334 - protein, 20 aa, Homo sapiens
YVMELPKLKLSGVVRLSSYS

SEQ ID NO: 1335 - protein, 20 aa, Homo sapiens
FGQNYERIFILLEEVQGSMK

SEQ ID NO: 1336 - protein, 20 aa, Homo sapiens
EKALNAGFIQATDYVEIWQA

SEQ ID NO: 1337 - protein, 20 aa, Homo sapiens
ESKQLNVYEIKVNKLELELE

SEQ ID NO: 1338 - protein, 20 aa, Homo sapiens
GEVQNMLEGVGVDINKALLA

SEQ ID NO: 1339 - protein, 20 aa, Homo sapiens
FTGTPDPSRSIFKPFIFVDD

SEQ ID NO: 1340 - protein, 20 aa, Homo sapiens
YESTSAHIIEETEYVKKIRT

SEQ ID NO: 1341 - protein, 20 aa, Homo sapiens
RKRKQLHFFDSRLKDLKLGT

SEQ ID NO: 1342 - protein, 20 aa, Homo sapiens
TGGATVAEARVYRDARGRAS

SEQ ID NO: 1343 - protein, 20 aa, Homo sapiens
IAKPNNAYEFGQIINALSTR

SEQ ID NO: 1344 - protein, 20 aa, Homo sapiens
GYRNKIYVVQPKAMKIEKSF

SEQ ID NO: 1345 - protein, 20 aa, Homo sapiens
DIMRDRIEQVRRSISRLTDV

SEQ ID NO: 1346 - protein, 20 aa, Homo sapiens
DVLDRHRESLLAALRRGGRE

SEQ ID NO: 1347 - protein, 20 aa, Homo sapiens
DNDHNRRIQVEHPQMTFGRL

SEQ ID NO: 1348 - protein, 20 aa, Homo sapiens
PNRGNQVQRPQMTFGRLQGI

SEQ ID NO: 1349 - protein, 20 aa, Homo sapiens
HRLRERKQLVVYEEISDPEE

SEQ ID NO: 1350 - protein, 20 aa, Homo sapiens
QIPEKMQKAFDDIAKYFSEK

SEQ ID NO: 1351 - protein, 20 aa, Homo sapiens
LQIEEEKNKQRQLRLAFEEQ

SEQ ID NO: 1352 - protein, 20 aa, Homo sapiens
GSIPGFLISSGMSSHKQGHT

SEQ ID NO: 1353 - protein, 20 aa, Homo sapiens
GLSYRWLLNEFPNFIPTDGR

SEQ ID NO: 1354 - protein, 20 aa, Homo sapiens
IISDVLIDEHLVLKSASPHK

SEQ ID NO: 1355 - protein, 20 aa, Homo sapiens
FQAENTIMLLERSIMAKEGP

SEQ ID NO: 1356 - protein, 20 aa, Homo sapiens
WKRLGWSESSRIIVLDQSDL

SEQ ID NO: 1357 - protein, 20 aa, Homo sapiens
TKREKNSYYVFLKYKRQVNE

SEQ ID NO: 1358 - protein, 20 aa, Homo sapiens
RSSLEYRASSRLKELAAPKI

SEQ ID NO: 1359 - protein, 20 aa, Homo sapiens
QKRYVAYFAQVKHLYNWNLP

SEQ ID NO: 1360 - protein, 20 aa, Homo sapiens
ENELDSAHSEIELLRSQMAN

SEQ ID NO: 1361 - protein, 20 aa, Homo sapiens
DIGLLKLKQELKYSNYVRPI

SEQ ID NO: 1362 - protein, 20 aa, Homo sapiens
SNPYFQNKVITKEYLVNITE

SEQ ID NO: 1363 - protein, 20 aa, Homo sapiens
PAFLPWHRLFLLRWEQEIQK

SEQ ID NO: 1364 - protein, 20 aa, Homo sapiens
AQYRIHTHGVFRGIQDVRRV

SEQ ID NO: 1365 - protein, 20 aa, Homo sapiens
EHGQEIFQKKVSPPGPALNV

SEQ ID NO: 1366 - protein, 20 aa, Homo sapiens
DERQNRSFEGMVVAALLAGR

SEQ ID NO: 1367 - protein, 20 aa, Homo sapiens
TPTAKAWKYMEEEILGFGKS

SEQ ID NO: 1368 - protein, 20 aa, Homo sapiens
WEGSNRNFSVWLGASVVAHL

SEQ ID NO: 1369 - protein, 20 aa, Homo sapiens
VLIAIMVKVNFQRKKWRTED

SEQ ID NO: 1370 - protein, 20 aa, Homo sapiens
ERNDSKLLEDLYVIVNIVDS

SEQ ID NO: 1371 - protein, 20 aa, Homo sapiens
QITEEQLEAVIADFSGLLEK

SEQ ID NO: 1372 - protein, 20 aa, Homo sapiens
IDGHMSGQMVEHLMNSVMKL

SEQ ID NO: 1373 - protein, 20 aa, Homo sapiens
QVASDMMVSLMKTLKVHSSG

SEQ ID NO: 1374 - protein, 20 aa, Homo sapiens
KELASALKSALSGHLETVIL

SEQ ID NO: 1375 - protein, 20 aa, Homo sapiens
ELEHLQTVKNISPLQILPPS

SEQ ID NO: 1376 - protein, 20 aa, Homo sapiens
AQLEENAKYSSVYMEAEATA

SEQ ID NO: 1377 - protein, 20 aa, Homo sapiens
SGEMLKFTEKSLAKSIAKES

SEQ ID NO: 1378 - protein, 20 aa, Homo sapiens
GTIFDNFLITDDEEYADNFG

SEQ ID NO: 1379 - protein, 20 aa, Homo sapiens
NFNVENSQELIQMYDSKMEE

SEQ ID NO: 1380 - protein, 20 aa, Homo sapiens
NYKEKMKDTVQKLKNARQEV

SEQ ID NO: 1381 - protein, 20 aa, Homo sapiens
TERERMENIDSTILSPKQIK

SEQ ID NO: 1382 - protein, 20 aa, Homo sapiens
HSEQNELMADISKRIQSLED

SEQ ID NO: 1383 - protein, 20 aa, Homo sapiens
EELERTIHSYQGQIISHEKK

SEQ ID NO: 1384 - protein, 20 aa, Homo sapiens
EESEKYILTLQTVHFTSEAV

SEQ ID NO: 1385 - protein, 20 aa, Homo sapiens
SLEERLESIISGAALMADSS

SEQ ID NO: 1386 - protein, 20 aa, Homo sapiens
SIYFSSDVVTGNVPLKVGQK

SEQ ID NO: 1387 - protein, 20 aa, Homo sapiens
ALIVFWKYRRFQRNTGEMSS

SEQ ID NO: 1388 - protein, 20 aa, Homo sapiens
NPATAVSGTPAPPARSQADK

SEQ ID NO: 1389 - protein, 20 aa, Homo sapiens
ETWRNYFSDIDFFPNAVYTH

SEQ ID NO: 1390 - protein, 20 aa, Homo sapiens
EVLISENVVASIQPAEGSFE

SEQ ID NO: 1391 - protein, 20 aa, Homo sapiens
PQYSMALAADSASGEVGNPL

SEQ ID NO: 1392 - protein, 20 aa, Homo sapiens
HKAREKPYDSKSLRTALQKE

SEQ ID NO: 1393 - protein, 20 aa, Homo sapiens
MAAGYTAIEKVVQMTNDDIK

SEQ ID NO: 1394 - protein, 20 aa, Homo sapiens
AESMYGDFQEAMTHLQHKLI

SEQ ID NO: 1395 - protein, 20 aa, Homo sapiens
VAQTSLEEFNVLEMEVMRRQ

SEQ ID NO: 1396 - protein, 20 aa, Homo sapiens
KYRKLIESELSYFVIVYSVM

SEQ ID NO: 1397 - protein, 20 aa, Homo sapiens
STEPGSFKVDTASNLNSGKE

SEQ ID NO: 1398 - protein, 20 aa, Homo sapiens
LENFFRYFLRLSDDKMEHAQ

SEQ ID NO: 1399 - protein, 20 aa, Homo sapiens
PVNSQKITLEWASPQNFTSV

SEQ ID NO: 1400 - protein, 20 aa, Homo sapiens
NRPLIKPKRRLSAARRAGTS

SEQ ID NO: 1401 - protein, 20 aa, Homo sapiens
EAFEIVVRHAKNYTNAMFKN

SEQ ID NO: 1402 - protein, 20 aa, Homo sapiens
QLHDPSGYLAEADLSYTWDF

SEQ ID NO: 1403 - protein, 20 aa, Homo sapiens
IPEELVSMAERFKAHQQKRE

SEQ ID NO: 1404 - protein, 20 aa, Homo sapiens
KQQTDIAVNWAGGLHHAKKS

SEQ ID NO: 1405 - protein, 20 aa, Homo sapiens
HNLLLNYGLYRKMEIYRPHK

SEQ ID NO: 1406 - protein, 20 aa, Homo sapiens
RFHSEDYIDFLQRVSPTNMQ

SEQ ID NO: 1407 - protein, 20 aa, Homo sapiens
TLVVTANRGSSPQVMSRSNG

SEQ ID NO: 1408 - protein, 20 aa, Homo sapiens
IRSSYFTFQLQNIVKPLPPV

SEQ ID NO: 1409 - protein, 20 aa, Homo sapiens
RDYTLRTFGEMADAFKSDYF

SEQ ID NO: 1410 - protein, 20 aa, Homo sapiens
EEIPLKILAHNNFVGRLIGK

SEQ ID NO: 1411 - protein, 20 aa, Homo sapiens
GGLKKLLSFAENSTIPDIQK

SEQ ID NO: 1412 - protein, 20 aa, Homo sapiens
DLQHGSLFFSTSKITSGKDY

SEQ ID NO: 1413 - protein, 20 aa, Homo sapiens
VKNTRKVAVSLSVHIKNLLK

SEQ ID NO: 1414 - protein, 20 aa, Homo sapiens
KVLEYVIKVSARVRFFFPSL

SEQ ID NO: 1415 - protein, 20 aa, Homo sapiens
TSLGLTYDGMLSDVQSMPKT

SEQ ID NO: 1416 - protein, 20 aa, Homo sapiens
SFSQDILHDKIIDLVHLLLR

SEQ ID NO: 1417 - protein, 20 aa, Homo sapiens
APEEKIWEELSVLEASDGRE

SEQ ID NO: 1418 - protein, 20 aa, Homo sapiens
ELVHFLLLKYRAREPVTKAE

SEQ ID NO: 1419 - protein, 20 aa, Homo sapiens
ESAGPPQSPQGASALPTTIS

SEQ ID NO: 1420 - protein, 20 aa, Homo sapiens
GSVVGNWQYFFPVIFSKASD

SEQ ID NO: 1421 - protein, 20 aa, Homo sapiens
TKAEMLESVIKNYKNHFPDI

SEQ ID NO: 1422 - protein, 20 aa, Homo sapiens
EPRKLLTQDWVQENYLEYRQ

SEQ ID NO: 1423 - protein, 20 aa, Homo sapiens
MLMHFILRKYKMREPIMKAD

SEQ ID NO: 1424 - protein, 20 aa, Homo sapiens
FGLELNKVNPNGHTYTFIDK

SEQ ID NO: 1425 - protein, 20 aa, Homo sapiens
SKMKVLEFWAKVNKTVPSAF

SEQ ID NO: 1426 - protein, 20 aa, Homo sapiens
FRKVSQRTELVFGLALKEVN

SEQ ID NO: 1427 - protein, 20 aa, Homo sapiens
SASQKAIIFKRLSKDAVKKK

SEQ ID NO: 1428 - protein, 20 aa, Homo sapiens
LQIPVSPSSSSTLLSLFQSF

SEQ ID NO: 1429 - protein, 20 aa, Homo sapiens
KDYFPVILKRAREFMELLFG

SEQ ID NO: 1430 - protein, 20 aa, Homo sapiens
NDVLAMKRSSSLPSWKSLLN

SEQ ID NO: 1431 - protein, 20 aa, Homo sapiens
AFTKLNNASSRSHSIFTVKI

SEQ ID NO: 1432 - protein, 20 aa, Homo sapiens
RRKNYGQLDIFPARDTYHPM

SEQ ID NO: 1433 - protein, 20 aa, Homo sapiens
RAHLAKNLKLTETQVKIWFQ

SEQ ID NO: 1434 - protein, 20 aa, Homo sapiens
EKLDAFFGFQLSQEIKQQIH

SEQ ID NO: 1435 - protein, 20 aa, Homo sapiens
QSYSLIHQLLSAEDLEPLGT

SEQ ID NO: 1436 - protein, 20 aa, Homo sapiens
YLKGELLRRTKRDIVDSLSA

SEQ ID NO: 1437 - protein, 20 aa, Homo sapiens
SLVEKTPDEAASLVEGTSDK

SEQ ID NO: 1438 - protein, 20 aa, Homo sapiens
KPAELSRGRGILIFSDFKDF

SEQ ID NO: 1439 - protein, 20 aa, Homo sapiens
EAARRQFQSQLADLQQLPDI

SEQ ID NO: 1440 - protein, 20 aa, Homo sapiens
LTPGPGDYFPEKSTKYVFDS

SEQ ID NO: 1441 - protein, 20 aa, Homo sapiens
PFQWRITHSFRWMAQVLASE

SEQ ID NO: 1442 - protein, 20 aa, Homo sapiens
SVHLAWDLSRSLGAVVFSRV

SEQ ID NO: 1443 - protein, 20 aa, Homo sapiens
EHGDSSAYENVKFIVNVRDI

SEQ ID NO: 1444 - protein, 20 aa, Homo sapiens
GTGVNVYLMKRSPRGLSHSP

SEQ ID NO: 1445 - protein, 20 aa, Homo sapiens
TEADRVIQRTNSMQQLEQWI

SEQ ID NO: 1446 - protein, 20 aa, Homo sapiens
KRVNTRFFAQSGGRLQNPLP

SEQ ID NO: 1447 - protein, 20 aa, Homo sapiens
AGPIGMRMSPPAWVELKDDR

SEQ ID NO: 1448 - protein, 20 aa, Homo sapiens
HDIVNRQKSIAGFVASTNAE

SEQ ID NO: 1449 - protein, 20 aa, Homo sapiens
LNKWYKYNHDLPARIIVYRA

SEQ ID NO: 1450 - protein, 20 aa, Homo sapiens
KKLKIFAMPMQDIKMILKMV

SEQ ID NO: 1451 - protein, 20 aa, Homo sapiens
YSEELFPEELSVVLGTNDLT

SEQ ID NO: 1452 - protein, 20 aa, Homo sapiens
EENSRLLQERGVAYINADSS

SEQ ID NO: 1453 - protein, 20 aa, Homo sapiens
YELIRGRRYPLSEKKIMHYM

SEQ ID NO: 1454 - protein, 20 aa, Homo sapiens
RPRRINMTDTGISPMSTRDP

SEQ ID NO: 1455 - protein, 20 aa, Homo sapiens
AIVEAARLEKVHSLFRRQLA

SEQ ID NO: 1456 - protein, 20 aa, Homo sapiens
DSDPALQKVNFLPVLEQVGN

SEQ ID NO: 1457 - protein, 20 aa, Homo sapiens
DVIEGKTAVIEKRRKKRSSA

SEQ ID NO: 1458 - protein, 20 aa, Homo sapiens
VAFPPRAKDGLVVFGKNSAR

SEQ ID NO: 1459 - protein, 20 aa, Homo sapiens
EAQNKELKTQVALSSETPRT

SEQ ID NO: 1460 - protein, 20 aa, Homo sapiens
SSGISFQSKYLSFFILGQTV

SEQ ID NO: 1461 - protein, 20 aa, Homo sapiens
MITQLISLREQLLAAHDEQK

SEQ ID NO: 1462 - protein, 20 aa, Homo sapiens
DLNKVILLDPSIIEAKMELE

SEQ ID NO: 1463 - protein, 20 aa, Homo sapiens
GGSGAVMSERVSGLAGSIYR

SEQ ID NO: 1464 - protein, 20 aa, Homo sapiens
FLPITSSDIDVVESEAVSVL

SEQ ID NO: 1465 - protein, 20 aa, Homo sapiens
ILSTSKGLIAGNLRYIEEDG

SEQ ID NO: 1466 - protein, 20 aa, Homo sapiens
YMKRKYEAMTKLGFKAILPS

SEQ ID NO: 1467 - protein, 20 aa, Homo sapiens
QKVGSLEPRVEVLINRINEV

SEQ ID NO: 1468 - protein, 20 aa, Homo sapiens
TVRNLARSQSVKMKDKLKID

SEQ ID NO: 1469 - protein, 20 aa, Homo sapiens
EVHIVRNGGTSMMVENMAVR

SEQ ID NO: 1470 - protein, 20 aa, Homo sapiens
KLVENSLSISNPGLFTSLGP

SEQ ID NO: 1471 - protein, 20 aa, Homo sapiens
TLKLRLRETQDTLQLLVMTK

SEQ ID NO: 1472 - protein, 20 aa, Homo sapiens
SREFTNAYKLPLAVGPPSLN

SEQ ID NO: 1473 - protein, 20 aa, Homo sapiens
FRQPIFSQYASHQPLPQATY

SEQ ID NO: 1474 - protein, 20 aa, Homo sapiens
PSSRILQLSKPKAPATLLEE

SEQ ID NO: 1475 - protein, 20 aa, Homo sapiens
DLKIQIEMEKKVVFSTISLG

SEQ ID NO: 1476 - protein, 20 aa, Homo sapiens
KVLKSERDKIFLLYEQAQEE

SEQ ID NO: 1477 - protein, 20 aa, Homo sapiens
GAGEAPGALSTADPADQSVQ

SEQ ID NO: 1478 - protein, 20 aa, Homo sapiens
YEVEAYRRRHHNSSLNFFNW

SEQ ID NO: 1479 - protein, 20 aa, Homo sapiens
YRNGDFFISSKDLGYDYSYL

SEQ ID NO: 1480 - protein, 20 aa, Homo sapiens
ERRFSRSDQLKRHQRRHTGV

SEQ ID NO: 1481 - protein, 20 aa, Homo sapiens
FINHQIIYAGEKNHQYGKSF

SEQ ID NO: 1482 - protein, 20 aa, Homo sapiens
LADLSPFAFSGSNASVSAPS

SEQ ID NO: 1483 - protein, 20 aa, Homo sapiens
PKFHSESLSSNPSSFAPRVR

SEQ ID NO: 1484 - protein, 20 aa, Homo sapiens
WLGASVVAHLSTYQSEWMSR

SEQ ID NO: 1485 - protein, 20 aa, Homo sapiens
WRVLFLLSGLGGLRMDSNFD

SEQ ID NO: 1486 - protein, 20 aa, Homo sapiens
VIDNYLYIRYERNDSKLLED

SEQ ID NO: 1487 - protein, 20 aa, Homo sapiens
KGEEELQKYIQESQALAKRS

SEQ ID NO: 1488 - protein, 20 aa, Homo sapiens
QKATDIMDAMLRKLYNVMFA

SEQ ID NO: 1489 - protein, 20 aa, Homo sapiens
LAKDLIVSALKLIQYHLTQQ

SEQ ID NO: 1490 - protein, 20 aa, Homo sapiens
VPHLQKVFDRYKSYSPYDML

SEQ ID NO: 1491 - protein, 20 aa, Homo sapiens
YNPPDHEVVTMARMLQDVFE

SEQ ID NO: 1492 - protein, 20 aa, Homo sapiens
DQAPEVTLQADIEVMSTVHI

SEQ ID NO: 1493 - protein, 20 aa, Homo sapiens
KEAQEQEFLSLQEEFQKLEK

SEQ ID NO: 1494 - protein, 20 aa, Homo sapiens
SGKINRHEHYFNQFHRRNEL

SEQ ID NO: 1495 - protein, 20 aa, Homo sapiens
EKQDYKQKLKALKIEVNKLK

SEQ ID NO: 1496 - protein, 20 aa, Homo sapiens
EEQEEFKQLSDGIQELQQSL

SEQ ID NO: 1497 - protein, 20 aa, Homo sapiens
ALQKKYLRMVVLAVYTNPED

SEQ ID NO: 1498 - protein, 20 aa, Homo sapiens
LSGPAELRSFNMPSLDKMDG

SEQ ID NO: 1499 - protein, 20 aa, Homo sapiens
AEAKMTFKIFQMNEERLKIA

SEQ ID NO: 1500 - protein, 20 aa, Homo sapiens
FRQKQLLNAHFRKYHDANFI

SEQ ID NO: 1501 - protein, 20 aa, Homo sapiens
QPFEENEFIDASRLVYDGVR

SEQ ID NO: 1502 - protein, 20 aa, Homo sapiens
GDYGMIDESIYFSSDVVTGN

SEQ ID NO: 1503 - protein, 20 aa, Homo sapiens
SRDILNNFPHSIARQKRILV

SEQ ID NO: 1504 - protein, 20 aa, Homo sapiens
AIKRNNPRKFLRSVGDGETV

SEQ ID NO: 1505 - protein, 20 aa, Homo sapiens
GAVSLDGYFHLWKAENTLSK

SEQ ID NO: 1506 - protein, 20 aa, Homo sapiens
DAQESSLGLTGLQSLLQGFS

SEQ ID NO: 1507 - protein, 20 aa, Homo sapiens
GISHPIPLPSAAELLVKREN

SEQ ID NO: 1508 - protein, 20 aa, Homo sapiens
LVISRKKRMAKYEKAEIKEM

SEQ ID NO: 1509 - protein, 20 aa, Homo sapiens
GVPFRTVSEWLESIKMQQYT

SEQ ID NO: 1510 - protein, 20 aa, Homo sapiens
MSEIRFTNLTWDQVITLDQV

SEQ ID NO: 1511 - protein, 20 aa, Homo sapiens
AVNRRLRALEEQGATWRHRE

SEQ ID NO: 1512 - protein, 20 aa, Homo sapiens
VESAVWYVKKFGRYLEHLEV

SEQ ID NO: 1513 - protein, 20 aa, Homo sapiens
KHNQDFIKRNIELAKESRNP

SEQ ID NO: 1514 - protein, 20 aa, Homo sapiens
TSYLYLSMAFYFNRDDVALE

SEQ ID NO: 1515 - protein, 20 aa, Homo sapiens
SKDQQKILAALKELQVEEIQ

SEQ ID NO: 1516 - protein, 20 aa, Homo sapiens
GPLSVYPPASSSSLSGGHAS

SEQ ID NO: 1517 - protein, 20 aa, Homo sapiens
EELVNGMYRIYDMENVLLGL

SEQ ID NO: 1518 - protein, 20 aa, Homo sapiens
QVSLKVSNDGPTLIGANASF

SEQ ID NO: 1519 - protein, 20 aa, Homo sapiens
TRNDWRVASELINILERANQ

SEQ ID NO: 1520 - protein, 20 aa, Homo sapiens
QLSTGGSVASAVKLNKQQTD

SEQ ID NO: 1521 - protein, 20 aa, Homo sapiens
SDEYIKFLRSIRPDNMSEYS

SEQ ID NO: 1522 - protein, 20 aa, Homo sapiens
EDYIDFLQRVSPTNMQGFTK

SEQ ID NO: 1523 - protein, 20 aa, Homo sapiens
TESVSHFSDLGQSFSFHSGN

SEQ ID NO: 1524 - protein, 20 aa, Homo sapiens
LVTATVENETYTLKTTNETR

SEQ ID NO: 1525 - protein, 20 aa, Homo sapiens
PARRAKRMRAEAMNIKIEPE

SEQ ID NO: 1526 - protein, 20 aa, Homo sapiens
KKIRESYENDIASMNLQAHL

SEQ ID NO: 1527 - protein, 20 aa, Homo sapiens
KSDNEEVREAAALALANLTT

SEQ ID NO: 1528 - protein, 20 aa, Homo sapiens
AIGLSVMDLVGSILKNLRRV

SEQ ID NO: 1529 - protein, 20 aa, Homo sapiens
KPPYSRLDYTDAKFVDVIHS

SEQ ID NO: 1530 - protein, 20 aa, Homo sapiens
IFGKASESLQLVFGIDVKEA

SEQ ID NO: 1531 - protein, 20 aa, Homo sapiens
SSPSVVASLPLDQSDEGSSS

SEQ ID NO: 1532 - protein, 20 aa, Homo sapiens
QNWVQEKYLVYRQVPGTDPA

SEQ ID NO: 1533 - protein, 20 aa, Homo sapiens
QEGPSTFPDLETSFQVALSR

SEQ ID NO: 1534 - protein, 20 aa, Homo sapiens
DLESEFQAAISRKMVELVHF

SEQ ID NO: 1535 - protein, 20 aa, Homo sapiens
VGNWQYFFPVIFSKASSSLQ

SEQ ID NO: 1536 - protein, 20 aa, Homo sapiens
LEHVVRVNARVRIAYPSLRE

SEQ ID NO: 1537 - protein, 20 aa, Homo sapiens
VGNWQYFFPVIFSKASDSLQ

SEQ ID NO: 1538 - protein, 20 aa, Homo sapiens
AASSSSTLIMGTLEEVTDSG

SEQ ID NO: 1539 - protein, 20 aa, Homo sapiens
EEPSSSVDPAQLEFMFQEAL

SEQ ID NO: 1540 - protein, 20 aa, Homo sapiens
ETTKMKVLEFLAKMNGATPR

SEQ ID NO: 1541 - protein, 20 aa, Homo sapiens
AETSKMKVLEFLAKVNGTTP

SEQ ID NO: 1542 - protein, 20 aa, Homo sapiens
LKKPQRALSTTTSVDVSYKK

SEQ ID NO: 1543 - protein, 20 aa, Homo sapiens
TTAMTSAYSRATSSSSSQPM

SEQ ID NO: 1544 - protein, 20 aa, Homo sapiens
RTSQHLVVAFGVELKEMDSS

SEQ ID NO: 1545 - protein, 20 aa, Homo sapiens
PLQSPVISFSSSTSLSPFSE

SEQ ID NO: 1546 - protein, 20 aa, Homo sapiens
EEEEEASSASSTLYLVFSPS

SEQ ID NO: 1547 - protein, 20 aa, Homo sapiens
ERSQRSQIANITTVWRAQPT

SEQ ID NO: 1548 - protein, 20 aa, Homo sapiens
VQQIQSNYDIAIAELHVQKS

SEQ ID NO: 1549 - protein, 20 aa, Homo sapiens
DVSVSDVPFPFSAQSGAGVP

SEQ ID NO: 1550 - protein, 20 aa, Homo sapiens
LSSELGDLEKHSSLPALKEE

SEQ ID NO: 1551 - protein, 20 aa, Homo sapiens
YISEMLLRNKSVRYLDLSAN

SEQ ID NO: 1552 - protein, 20 aa, Homo sapiens
EELHRFSDEGMEVIERLIYL

SEQ ID NO: 1553 - protein, 20 aa, Homo sapiens
VTIPYGIKYDKAWLMNSIQS

SEQ ID NO: 1554 - protein, 20 aa, Homo sapiens
ESLDQKLFQLQSKNMWLQQQ

SEQ ID NO: 1555 - protein, 20 aa, Homo sapiens
YWRTSSFRMTEHNSVKPWQQ

SEQ ID NO: 1556 - protein, 20 aa, Homo sapiens
ELSKSMESMRGHLQAQLRSK

SEQ ID NO: 1557 - protein, 20 aa, Homo sapiens
PINIWIFELERNVSIPIGWS

SEQ ID NO: 1558 - protein, 20 aa, Homo sapiens
GGTERAIDQASFTTSMEWDT

SEQ ID NO: 1559 - protein, 20 aa, Homo sapiens
GPPDPQAFQGPAAYQPDQMR

SEQ ID NO: 1560 - protein, 20 aa, Homo sapiens
PINMEELDESYQKVIELFSV

SEQ ID NO: 1561 - protein, 20 aa, Homo sapiens
YSPQRTYRSEVSSPIQRGDV

SEQ ID NO: 1562 - protein, 20 aa, Homo sapiens
APLISVKPLDNWLLIYTRRN

SEQ ID NO: 1563 - protein, 20 aa, Homo sapiens
DIPLKQLMVIGMDVYHDPSR

SEQ ID NO: 1564 - protein, 20 aa, Homo sapiens
KRINTRFFLKHGSNFQNPPP

SEQ ID NO: 1565 - protein, 20 aa, Homo sapiens
DYPKIIKVQENPAAFVRAIQ

SEQ ID NO: 1566 - protein, 20 aa, Homo sapiens
DVMHLSQSPSVSQLSVLSLS

SEQ ID NO: 1567 - protein, 20 aa, Homo sapiens
FKRANMDNDIALLLLASPIK

SEQ ID NO: 1568 - protein, 20 aa, Homo sapiens
PRRTILFASWDAEEFGLLGS

SEQ ID NO: 1569 - protein, 20 aa, Homo sapiens
IGEGTFSEVMKMQSLRDGNY

SEQ ID NO: 1570 - protein, 20 aa, Homo sapiens
RKQDNVLSNVLSGLINMAGA

SEQ ID NO: 1571 - protein, 20 aa, Homo sapiens
PIPESVIQNYNKALQQLEKY

SEQ ID NO: 1572 - protein, 20 aa, Homo sapiens
FVPPRSSSSQVSAVKPQTLG

SEQ ID NO: 1573 - protein, 20 aa, Homo sapiens
RKRLEMYTKASLKTSNQKIE

SEQ ID NO: 1574 - protein, 20 aa, Homo sapiens
RPRDEVQEVVYFSAADHEPE

SEQ ID NO: 1575 - protein, 20 aa, Homo sapiens
NLVQRMEKEKRTLLERKLSL

SEQ ID NO: 1576 - protein, 20 aa, Homo sapiens
IRFGGFRKRKKAKSSVSKKP

SEQ ID NO: 1577 - protein, 20 aa, Homo sapiens
QAFPDMHNSNISKILGSRWK

SEQ ID NO: 1578 - protein, 20 aa, Homo sapiens
EKHLQALAPESRALRKDKPA

SEQ ID NO: 1579 - protein, 20 aa, Homo sapiens
GLAGSIYREFERLIGRYDEE

SEQ ID NO: 1580 - protein, 20 aa, Homo sapiens
IQDIITSLARNEAPAFTIDN

SEQ ID NO: 1581 - protein, 20 aa, Homo sapiens
KGERPGAAHQAGPDVLIGQE

SEQ ID NO: 1582 - protein, 20 aa, Homo sapiens
VIESLRTLDKKTFYKTADIS

SEQ ID NO: 1583 - protein, 20 aa, Homo sapiens
PGNISWTFSSSSLSIKWDPV

SEQ ID NO: 1584 - protein, 20 aa, Homo sapiens
SLSISNPGLFTSLGPPLRST

SEQ ID NO: 1585 - protein, 20 aa, Homo sapiens
QFTDTNLAFNARISEVTDVK

SEQ ID NO: 1586 - protein, 20 aa, Homo sapiens
KILKKGIYVDAVNSLGQTAL

SEQ ID NO: 1587 - protein, 20 aa, Homo sapiens
SNAAIQIASATMPALSLNND

SEQ ID NO: 1588 - protein, 20 aa, Homo sapiens
SRRVEELSRPKRFYLEYYNN

SEQ ID NO: 1589 - protein, 20 aa, Homo sapiens
SSGRQSFYRNPIKEVVRFLD

SEQ ID NO: 1590 - protein, 20 aa, Homo sapiens
TERDVAFTDLRRMTTERDSL

SEQ ID NO: 1591 - protein, 20 aa, Homo sapiens
FWSWVGQANDIGLLKLKQEL

SEQ ID NO: 1592 - protein, 20 aa, Homo sapiens
KVITKEYLVNITEYRASHST

SEQ ID NO: 1593 - protein, 20 aa, Homo sapiens
ASPLTGIADASQSSMHNALH

SEQ ID NO: 1594 - protein, 20 aa, Homo sapiens
AQFPNHSFKHEDPMGQQGSL

SEQ ID NO: 1595 - protein, 20 aa, Homo sapiens
DQSFKWNSDFINHQIIYAGE

SEQ ID NO: 1596 - protein, 20 aa, Homo sapiens
GYHYRYEINADPRLTNLSSN

SEQ ID NO: 1597 - protein, 20 aa, Homo sapiens
SGWLQTEFLSFQDGDFPTKI

SEQ ID NO: 1598 - protein, 20 aa, Homo sapiens
GSRVELTPMQRVAPEMFFSP

SEQ ID NO: 1599 - protein, 20 aa, Homo sapiens
VNLMQKNFLPHNFRVYSYSG

SEQ ID NO: 1600 - protein, 20 aa, Homo sapiens
FQGILQINDFAYEIKPLAFS

SEQ ID NO: 1601 - protein, 20 aa, Homo sapiens
LIFLLNFTESRTLHRNEYGI

SEQ ID NO: 1602 - protein, 20 aa, Homo sapiens
PPSKKSFFYKEVFESRNGDY

SEQ ID NO: 1603 - protein, 20 aa, Homo sapiens
SSGKPIPASVVLKRVLLRHT

SEQ ID NO: 1604 - protein, 20 aa, Homo sapiens
VNILTNRSNAQRQDIAFAYQ

SEQ ID NO: 1605 - protein, 20 aa, Homo sapiens
PDSQQQYNVVKTVKVTEQLR

SEQ ID NO: 1606 - protein, 20 aa, Homo sapiens
KTTSGMSKKSVESVKLAQLE

SEQ ID NO: 1607 - protein, 20 aa, Homo sapiens
SNLYLEKRVKELQMKITKQQ

SEQ ID NO: 1608 - protein, 20 aa, Homo sapiens
KMKNTDYLTQYDLSEFENIG

SEQ ID NO: 1609 - protein, 20 aa, Homo sapiens
APGHMSDVEWMSIFKPSKMQ

SEQ ID NO: 1610 - protein, 20 aa, Homo sapiens
RYNVAEIVIHIRNKILTGAD

SEQ ID NO: 1611 - protein, 20 aa, Homo sapiens
KTRSGKVFQNKMANGNQPVK

SEQ ID NO: 1612 - protein, 20 aa, Homo sapiens
SETRASLYPPTLLEGPLRLS

SEQ ID NO: 1613 - protein, 20 aa, Homo sapiens
SETRAFLSPPTLLEGPLRLS

SEQ ID NO: 1614 - protein, 20 aa, Homo sapiens
QLLAERTKEQLFFVETMSGD

SEQ ID NO: 1615 - protein, 20 aa, Homo sapiens
GAIRGRAARVIHIINAEMEN

SEQ ID NO: 1616 - protein, 20 aa, Homo sapiens
GLINSNTDNNLAVYDLSRDI

SEQ ID NO: 1617 - protein, 20 aa, Homo sapiens
LHKRKRLPPVKRSLVYYLKN

SEQ ID NO: 1618 - protein, 20 aa, Homo sapiens
LFSAPMDFRGLPGNYHKEEN

SEQ ID NO: 1619 - protein, 20 aa, Homo sapiens
VENTPDLVSDSTYYSSFYQP

SEQ ID NO: 1620 - protein, 20 aa, Homo sapiens
YQLDPKFITSILYENNVITI

SEQ ID NO: 1621 - protein, 20 aa, Homo sapiens
AGMKYLANMNYVHRDLAARN

SEQ ID NO: 1622 - protein, 20 aa, Homo sapiens
WSLISLSNNTGKNLELKFVS

SEQ ID NO: 1623 - protein, 20 aa, Homo sapiens
KAAGSASAKRVWNMTATRPK

SEQ ID NO: 1624 - protein, 20 aa, Homo sapiens
FYFKIWAFLDVSFVERILKS

SEQ ID NO: 1625 - protein, 20 aa, Homo sapiens
SKTLGIGRLKRPSFLDDPLY

SEQ ID NO: 1626 - protein, 20 aa, Homo sapiens
EHMTDLLKERDITLRHLLTM

SEQ ID NO: 1627 - protein, 20 aa, Homo sapiens
YGNSVRATVQRYPPTHHGSQ

SEQ ID NO: 1628 - protein, 20 aa, Homo sapiens
SLQVTRIFLQALNLGIEVIN

SEQ ID NO: 1629 - protein, 20 aa, Homo sapiens
VLPDGQVIWVNNTIINGSQV

SEQ ID NO: 1630 - protein, 20 aa, Homo sapiens
ALKSHFVGAVIGRGGSKIKN

SEQ ID NO: 1631 - protein, 20 aa, Homo sapiens
SDDYIKFLRSIRPDNMSEYS

SEQ ID NO: 1632 - protein, 20 aa, Homo sapiens
QLSTGGSVAGAVKLNRQQTD

SEQ ID NO: 1633 - protein, 20 aa, Homo sapiens
NHAPSVQIHDVPADLLTYDR

SEQ ID NO: 1634 - protein, 20 aa, Homo sapiens
QPEQVILYQGGQMFDGAPRF

SEQ ID NO: 1635 - protein, 20 aa, Homo sapiens
QHRAQQLLSSGNLKFVQDRV

SEQ ID NO: 1636 - protein, 20 aa, Homo sapiens
LENFTLKVAYIPDEMAAQQN

SEQ ID NO: 1637 - protein, 20 aa, Homo sapiens
AAEADGIDPLINLLSSKRDG

SEQ ID NO: 1638 - protein, 20 aa, Homo sapiens
LKDLADELALVDVALDKLKG

SEQ ID NO: 1639 - protein, 20 aa, Homo sapiens
DMNVIVVDWSRGATTFIYNR

SEQ ID NO: 1640 - protein, 20 aa, Homo sapiens
GEPRKLLTQDLVQEKYLEYR

SEQ ID NO: 1641 - protein, 20 aa, Homo sapiens
QSETQGLEGAQAPLAVEEDA

SEQ ID NO: 1642 - protein, 20 aa, Homo sapiens
LLLRKYRVKGLITKAEMLGS

SEQ ID NO: 1643 - protein, 20 aa, Homo sapiens
TKAEMLGSVIRNFQDFFPVI

SEQ ID NO: 1644 - protein, 20 aa, Homo sapiens
KPEEGLEARGEALGLVGAQA

SEQ ID NO: 1645 - protein, 20 aa, Homo sapiens
EEGPSTFPDLESEFQAALSR

SEQ ID NO: 1646 - protein, 20 aa, Homo sapiens
EEGVEAQEEALGLVGAQAPT

SEQ ID NO: 1647 - protein, 20 aa, Homo sapiens
PAHLESLFREALDEKVAELV

SEQ ID NO: 1648 - protein, 20 aa, Homo sapiens
KEPVTKAEMLESVIKNYKRY

SEQ ID NO: 1649 - protein, 20 aa, Homo sapiens
GEPRKFITQDLVQEKYLKYE

SEQ ID NO: 1650 - protein, 20 aa, Homo sapiens
GEPWKLITKDLVQEKYLEYK

SEQ ID NO: 1651 - protein, 20 aa, Homo sapiens
QSRTDPLIMKTNMLVQFLME

SEQ ID NO: 1652 - protein, 20 aa, Homo sapiens
AREEEIWEFLNMLGIYDGKR

SEQ ID NO: 1653 - protein, 20 aa, Homo sapiens
TKMRVLRVLADSSNTSPGLY

SEQ ID NO: 1654 - protein, 20 aa, Homo sapiens
STFEGFAQSSLQIPVSPSFS

SEQ ID NO: 1655 - protein, 20 aa, Homo sapiens
SEEVIWEVLNAVGVYAGREH

SEQ ID NO: 1656 - protein, 20 aa, Homo sapiens
KLREILLYFFPEHQLPSELE

SEQ ID NO: 1657 - protein, 20 aa, Homo sapiens
QQHVPFRESKLTHYFQSFFN

SEQ ID NO: 1658 - protein, 20 aa, Homo sapiens
ETQFNQYKTEAASRYNLTIS

SEQ ID NO: 1659 - protein, 20 aa, Homo sapiens
TTLLMKLMMAWSDNKIFRDR

SEQ ID NO: 1660 - protein, 20 aa, Homo sapiens
LTVYSKQIFGELADVTAKYS

SEQ ID NO: 1661 - protein, 20 aa, Homo sapiens
MAATLKIIERNFPELLSLNL

SEQ ID NO: 1662 - protein, 20 aa, Homo sapiens
GFHHIHEQIMEYIRKLSKNH

SEQ ID NO: 1663 - protein, 20 aa, Homo sapiens
DDNLKPWLLEVNYSPALTLD

SEQ ID NO: 1664 - protein, 20 aa, Homo sapiens
ELERKLEATSAQNIEFLQVI

SEQ ID NO: 1665 - protein, 20 aa, Homo sapiens
NRSLGQRQNSPLPFQWRITH

SEQ ID NO: 1666 - protein, 20 aa, Homo sapiens
PSSPVAYDIISQELELMKKL

SEQ ID NO: 1667 - protein, 20 aa, Homo sapiens
NDLIEERYKASQDPFPAAII

SEQ ID NO: 1668 - protein, 20 aa, Homo sapiens
IPTSPSHGSIAAYQGYSPQR

SEQ ID NO: 1669 - protein, 20 aa, Homo sapiens
KVLRSETVLDFMFNFYHQTE

SEQ ID NO: 1670 - protein, 20 aa, Homo sapiens
SQVVNVRTIGQPTRLRSVAQ

SEQ ID NO: 1671 - protein, 20 aa, Homo sapiens
LLANHFRVISRPQWVAYKYN

SEQ ID NO: 1672 - protein, 20 aa, Homo sapiens
QYDITVSDLNQPMLVSLLKK

SEQ ID NO: 1673 - protein, 20 aa, Homo sapiens
RRLWGSIQSRYISMSVWTSP

SEQ ID NO: 1674 - protein, 20 aa, Homo sapiens
VTQLEGRPFNAEKRRTSVKQ

SEQ ID NO: 1675 - protein, 20 aa, Homo sapiens
RLQDFDKSNPIVLRMMNDQL

SEQ ID NO: 1676 - protein, 20 aa, Homo sapiens
KLKLSGVVRLSSYSSPTLQS

SEQ ID NO: 1677 - protein, 20 aa, Homo sapiens
NNQPQPSYDLSTVLPGLTYL

SEQ ID NO: 1678 - protein, 20 aa, Homo sapiens
FRYSTSLEKHKLFISGLPFS

SEQ ID NO: 1679 - protein, 20 aa, Homo sapiens
MEKQKPFALFVPPRSSSSQV

SEQ ID NO: 1680 - protein, 20 aa, Homo sapiens
LQQSRIVQSQRLKTIKQLYE

SEQ ID NO: 1681 - protein, 20 aa, Homo sapiens
TGEGEFNFSEVFSPVEDHLD

SEQ ID NO: 1682 - protein, 20 aa, Homo sapiens
KQEDSKQLLQVNKLEKEQKL

SEQ ID NO: 1683 - protein, 20 aa, Homo sapiens
LLPEALIRFGGFRKRKKAKS

SEQ ID NO: 1684 - protein, 20 aa, Homo sapiens
AAASGLSPLQLQKGHVSHPQ

SEQ ID NO: 1685 - protein, 20 aa, Homo sapiens
LKNNLIEKDPSLVYQHLLYL

SEQ ID NO: 1686 - protein, 20 aa, Homo sapiens
GQGENKMKNLPVPVYLRPLD

SEQ ID NO: 1687 - protein, 20 aa, Homo sapiens
MLKVSRRSLHILSTSKGLIA

SEQ ID NO: 1688 - protein, 20 aa, Homo sapiens
GQDTSSQKIEDLMEMVQKLQ

SEQ ID NO: 1689 - protein, 20 aa, Homo sapiens
VWKHGITPPLKNVRKKRFRK

SEQ ID NO: 1690 - protein, 20 aa, Homo sapiens
NPVGTVVSREAILRFGFLQE

SEQ ID NO: 1691 - protein, 20 aa, Homo sapiens
KVLLDAGFAVGEQSMVTDKP

SEQ ID NO: 1692 - protein, 20 aa, Homo sapiens
QEQMRKLAQRIDIQMRDNRD

SEQ ID NO: 1693 - protein, 20 aa, Homo sapiens
QAKATQFNSALFTLSSHRQG

SEQ ID NO: 1694 - protein, 20 aa, Homo sapiens
PQAKEMFIDTVISSYNIETA

SEQ ID NO: 1695 - protein, 20 aa, Homo sapiens
NEGYDRRPLASMSLPPPKAS

SEQ ID NO: 1696 - protein, 20 aa, Homo sapiens
RQQYFSDLFNILDTAIIVIL

SEQ ID NO: 1697 - protein, 20 aa, Homo sapiens
KSPKSTTAHAILRRVETERD

SEQ ID NO: 1698 - protein, 20 aa, Homo sapiens
LSKADGMWPQFRTIQEKEVI

SEQ ID NO: 1699 - protein, 20 aa, Homo sapiens
ASAKEGTAFRMEAVQEGAAG

SEQ ID NO: 1700 - protein, 20 aa, Homo sapiens
FVDSIFEQWLRRHRPLQEVY

SEQ ID NO: 1701 - protein, 20 aa, Homo sapiens
PPPHSFIKQEPSWGGAEPHE

SEQ ID NO: 1702 - protein, 20 aa, Homo sapiens
SQSSNLSQHQRIHMRENLLM

SEQ ID NO: 1703 - protein, 20 aa, Homo sapiens
THLESLHLEDNALKVLHNGT

SEQ ID NO: 1704 - protein, 20 aa, Homo sapiens
SPISPHFTVTERQTFQPWPE

SEQ ID NO: 1705 - protein, 20 aa, Homo sapiens
GFTKRLFRELMGDHVSSTKA

SEQ ID NO: 1706 - protein, 20 aa, Homo sapiens
DFAKYIEMHVIVEKQLYNHM

SEQ ID NO: 1707 - protein, 20 aa, Homo sapiens
EDLYVIVNIVDSILDVIGVK

SEQ ID NO: 1708 - protein, 20 aa, Homo sapiens
KAPQLTSSELMAITRKMAAT

SEQ ID NO: 1709 - protein, 20 aa, Homo sapiens
ERQLNEAVGNVTPLQLLDWL

SEQ ID NO: 1710 - protein, 20 aa, Homo sapiens
QWKQNATDIMEAMLKRLVSA

SEQ ID NO: 1711 - protein, 20 aa, Homo sapiens
KIRSEFKRKYGKSLYYYIQQ

SEQ ID NO: 1712 - protein, 20 aa, Homo sapiens
KNGRLTNQLQYLQKVVLKDL

SEQ ID NO: 1713 - protein, 20 aa, Homo sapiens
LSGEAAEAVHSGTSVKSSSG

SEQ ID NO: 1714 - protein, 20 aa, Homo sapiens
SDTMNVSNLSQGVMLSHSPI

SEQ ID NO: 1715 - protein, 20 aa, Homo sapiens
GFDIKKVHVILHFKNKYHEN

SEQ ID NO: 1716 - protein, 20 aa, Homo sapiens
SDLQFLNFNVENSQELIQMY

SEQ ID NO: 1717 - protein, 20 aa, Homo sapiens
TYMEFLWQYKSSADKMQQLN

SEQ ID NO: 1718 - protein, 20 aa, Homo sapiens
TILSPKQIKTPFQKILRDKD

SEQ ID NO: 1719 - protein, 20 aa, Homo sapiens
QQKLKVMTELYQENEMKLYR

SEQ ID NO: 1720 - protein, 20 aa, Homo sapiens
SEQDELMADISKRIQSLEDE

SEQ ID NO: 1721 - protein, 20 aa, Homo sapiens
MSLLSIQQQEGVQVVVQQPG

SEQ ID NO: 1722 - protein, 20 aa, Homo sapiens
GPLKNTSDVINAAKKIAEAG

SEQ ID NO: 1723 - protein, 20 aa, Homo sapiens
HAIELNPSRTLLATGGDNPN

SEQ ID NO: 1724 - protein, 20 aa, Homo sapiens
TLSSHLQIDKMTDNKTGEVL

SEQ ID NO: 1725 - protein, 20 aa, Homo sapiens
VKNSLRGLPGPYVPGQTGNQ

SEQ ID NO: 1726 - protein, 20 aa, Homo sapiens
DVDIADVAYYFEKDVKGESL

SEQ ID NO: 1727 - protein, 20 aa, Homo sapiens
ERSVGPLTRKGFYLAFQDIG

SEQ ID NO: 1728 - protein, 20 aa, Homo sapiens
KEKLSPDIMKDAYVQKLVKV

SEQ ID NO: 1729 - protein, 20 aa, Homo sapiens
FNVLEMEVMRRQLYAVNRRL

SEQ ID NO: 1730 - protein, 20 aa, Homo sapiens
KFMNPYNAVLTKKFQVTMRG

SEQ ID NO: 1731 - protein, 20 aa, Homo sapiens
DIEDVTPVFPQLSRSIISKL

SEQ ID NO: 1732 - protein, 20 aa, Homo sapiens
LREEVSTWNSRILKRTAITI

SEQ ID NO: 1733 - protein, 20 aa, Homo sapiens
GSHHTASPWNLSPFSKTSIH

SEQ ID NO: 1734 - protein, 20 aa, Homo sapiens
KVKNQLRFLAELAYDLDVDD

SEQ ID NO: 1735 - protein, 20 aa, Homo sapiens
PDASSIMSTESITGSLGPLL

SEQ ID NO: 1736 - protein, 20 aa, Homo sapiens
HDVTHVYNFDFPRNIEEYVH

SEQ ID NO: 1737 - protein, 20 aa, Homo sapiens
NLLLNYGLYRKMEIYRPHKA

SEQ ID NO: 1738 - protein, 20 aa, Homo sapiens
LNYGLYRKMEIYRPHKATAE

SEQ ID NO: 1739 - protein, 20 aa, Homo sapiens
FEYFAPDFTLHPDVSTRIEN

SEQ ID NO: 1740 - protein, 20 aa, Homo sapiens
PATNVSIFINNTQLSDTGTY

SEQ ID NO: 1741 - protein, 20 aa, Homo sapiens
QDLLDVSFEFDVELPQLAEM

SEQ ID NO: 1742 - protein, 20 aa, Homo sapiens
RVPSFAAGRVIGKGGKTVNE

SEQ ID NO: 1743 - protein, 20 aa, Homo sapiens
SSKRDGAIANAATVLTNMAM

SEQ ID NO: 1744 - protein, 20 aa, Homo sapiens
RRVHPVSTMVKGLYGIKEEL

SEQ ID NO: 1745 - protein, 20 aa, Homo sapiens
SVKDSFRDLFIPRIETILMM

SEQ ID NO: 1746 - protein, 20 aa, Homo sapiens
DLVGFLLLKYRAREPVTKAE

SEQ ID NO: 1747 - protein, 20 aa, Homo sapiens
LYDGMEHLIYGEPRKLLTQD

SEQ ID NO: 1748 - protein, 20 aa, Homo sapiens
QAQEEDLGLVGAQALQAEEQ

SEQ ID NO: 1749 - protein, 20 aa, Homo sapiens
ELVHFLLLKYRAREPFTKAE

SEQ ID NO: 1750 - protein, 20 aa, Homo sapiens
QSPQGASSLPTTMNYPLWSQ

SEQ ID NO: 1751 - protein, 20 aa, Homo sapiens
AKELVTKAEMLERVIKNYKR

SEQ ID NO: 1752 - protein, 20 aa, Homo sapiens
DPPQSPQGASSLPTTMNYPL

SEQ ID NO: 1753 - protein, 20 aa, Homo sapiens
QENYLEYRQAPGSDPVRYEF

SEQ ID NO: 1754 - protein, 20 aa, Homo sapiens
VIFGKASEFMQVIFGTDVKE

SEQ ID NO: 1755 - protein, 20 aa, Homo sapiens
VVDEKYKDHFTEILNGASRR

SEQ ID NO: 1756 - protein, 20 aa, Homo sapiens
KSGSLVQFLLYKYKIKKSVT

SEQ ID NO: 1757 - protein, 20 aa, Homo sapiens
NSNPARYEFLWGPRAHAETS

SEQ ID NO: 1758 - protein, 20 aa, Homo sapiens
AETSKMKVLEFLAKVNDTTP

SEQ ID NO: 1759 - protein, 20 aa, Homo sapiens
EGILSGDNALPKSGLLMSLL

SEQ ID NO: 1760 - protein, 20 aa, Homo sapiens
SDEQGMSQNRLLILILSIIF

SEQ ID NO: 1761 - protein, 20 aa, Homo sapiens
ASSTLYLVFSPSSFSTSSSL

SEQ ID NO: 1762 - protein, 20 aa, Homo sapiens
KQEFLNVQEYNHLLKVMGQY

SEQ ID NO: 1763 - protein, 20 aa, Homo sapiens
EQEKEEIASKSALLRQIKEV

SEQ ID NO: 1764 - protein, 20 aa, Homo sapiens
GSGSSTTQGQDVTLAPATEP

SEQ ID NO: 1765 - protein, 20 aa, Homo sapiens
LLQEANFHIIDNVDLVVSAY

SEQ ID NO: 1766 - protein, 20 aa, Homo sapiens
SPGSTLSSSRSVELNGFMAF

SEQ ID NO: 1767 - protein, 20 aa, Homo sapiens
NNKLYQLDGLSDITEKAPKV

SEQ ID NO: 1768 - protein, 20 aa, Homo sapiens
IPESIYQKVMEINREVEEPP

SEQ ID NO: 1769 - protein, 20 aa, Homo sapiens
GRGILIFSDFKDFIFDDMYI

SEQ ID NO: 1770 - protein, 20 aa, Homo sapiens
KSQVMKTRLEADEVAAQLER

SEQ ID NO: 1771 - protein, 20 aa, Homo sapiens
QPDQMRSAEQTRLMPAEQRD

SEQ ID NO: 1772 - protein, 20 aa, Homo sapiens
KRSPRGLSHSPWAVKKINPI

SEQ ID NO: 1773 - protein, 20 aa, Homo sapiens
GSILLPSFQIALLTSEDHIN

SEQ ID NO: 1774 - protein, 20 aa, Homo sapiens
GSSGIIVRLSTNHFRLTSRP

SEQ ID NO: 1775 - protein, 20 aa, Homo sapiens
KEITFLEYYSKNYGITVKEE

SEQ ID NO: 1776 - protein, 20 aa, Homo sapiens
GTSLEIWLGYVTSVLQYENS

SEQ ID NO: 1777 - protein, 20 aa, Homo sapiens
VDSEATRNEWYDFYLISQVA

SEQ ID NO: 1778 - protein, 20 aa, Homo sapiens
DSLFFLRGRLDQLLRHVMNP

SEQ ID NO: 1779 - protein, 20 aa, Homo sapiens
ENIKKFLYNFTQIPHLAGTE

SEQ ID NO: 1780 - protein, 20 aa, Homo sapiens
IRGRRYPLSEKKIMHYMYQL

SEQ ID NO: 1781 - protein, 20 aa, Homo sapiens
GSMKVKRQFVEFTIKEAARF

SEQ ID NO: 1782 - protein, 20 aa, Homo sapiens
PYEEALLQAEAPRLAEYQAY

SEQ ID NO: 1783 - protein, 20 aa, Homo sapiens
EETRQVYMDLNNNIEKMITA

SEQ ID NO: 1784 - protein, 20 aa, Homo sapiens
IEKRRKKRSSAGVVEDMGGE

SEQ ID NO: 1785 - protein, 20 aa, Homo sapiens
SQLSLTTKMDAEHPELRSYA

SEQ ID NO: 1786 - protein, 20 aa, Homo sapiens
QDKRIENLREKVNILEAQNK

SEQ ID NO: 1787 - protein, 20 aa, Homo sapiens
TTIAFFIYKRRLNENTDFPD

SEQ ID NO: 1788 - protein, 20 aa, Homo sapiens
QQQEQIARQQQQLLQQQHKI

SEQ ID NO: 1789 - protein, 20 aa, Homo sapiens
LADGNVKAFYRRALAHKGLK

SEQ ID NO: 1790 - protein, 20 aa, Homo sapiens
EKKRSSIWQFFSRLFSSSSN

SEQ ID NO: 1791 - protein, 20 aa, Homo sapiens
SLILKILSMIYKLVQSNTYA

SEQ ID NO: 1792 - protein, 20 aa, Homo sapiens
PDVENEVKRLLRSDAEAVST

SEQ ID NO: 1793 - protein, 20 aa, Homo sapiens
NESVRPYTPFEVKIRSYNRR

SEQ ID NO: 1794 - protein, 20 aa, Homo sapiens
LMELNGSSSQLIIMLLKNFM

SEQ ID NO: 1795 - protein, 20 aa, Homo sapiens
DIPQLKLVNEVFTIDDTLQT

SEQ ID NO: 1796 - protein, 20 aa, Homo sapiens
AEQEHSSKLRHPYLLQLMAV

SEQ ID NO: 1797 - protein, 20 aa, Homo sapiens
LRSLLWYDETLYAELLGKPR

SEQ ID NO: 1798 - protein, 20 aa, Homo sapiens
HVSDHNRLLHLARPKAQSDK

SEQ ID NO: 1799 - protein, 20 aa, Homo sapiens
TTDKILIDVFDGLPLYDDVK

SEQ ID NO: 1800 - protein, 20 aa, Homo sapiens
TVEKEMKSLARKAMDTESEL

SEQ ID NO: 1801 - protein, 20 aa, Homo sapiens
QMTQTASDVPVLQVIMHSRY

SEQ ID NO: 1802 - protein, 20 aa, Homo sapiens
TPIEWYPDYEVEAYRRRHHN

SEQ ID NO: 1803 - protein, 20 aa, Homo sapiens
SQVQGSANDPIFLLHHAFVD

SEQ ID NO: 1804 - protein, 20 aa, Homo sapiens
LESQPAIRNQGYSTVTFDGT

SEQ ID NO: 1805 - protein, 20 aa, Homo sapiens
LKPEIHTKEQILELLVLEQF

SEQ ID NO: 1806 - protein, 20 aa, Homo sapiens
ASNHFLYLPRDVLAQLPSLR

SEQ ID NO: 1807 - protein, 20 aa, Homo sapiens
ALSPGKSEDVVLRWSQEFST

SEQ ID NO: 1808 - protein, 20 aa, Homo sapiens
QNLGEALDFRERQQSALDES

SEQ ID NO: 1809 - protein, 20 aa, Homo sapiens
NFDSLPVQITVPEKIRSIIK

SEQ ID NO: 1810 - protein, 20 aa, Homo sapiens
FRIVEIVVVIDNYLYIRYER

SEQ ID NO: 1811 - protein, 20 aa, Homo sapiens
KWVESIFLIFLLNFTESRTL

SEQ ID NO: 1812 - protein, 20 aa, Homo sapiens
LGNGSSVDEVSFYANRLTNL

SEQ ID NO: 1813 - protein, 20 aa, Homo sapiens
YSVYADQVNIDYLMNRPQNL

SEQ ID NO: 1814 - protein, 20 aa, Homo sapiens
LEKDIISDTSGDFRKLMVAL

SEQ ID NO: 1815 - protein, 20 aa, Homo sapiens
GDKLGRVVHIIQSREPSLSN

SEQ ID NO: 1816 - protein, 20 aa, Homo sapiens
KVSSIHSDQSDVLMVDVATS

SEQ ID NO: 1817 - protein, 20 aa, Homo sapiens
GAKLDKYHSLNEELDFLVTS

SEQ ID NO: 1818 - protein, 20 aa, Homo sapiens
KVHVILHFKNKYHENKKLIR

SEQ ID NO: 1819 - protein, 20 aa, Homo sapiens
ARNETLSNTLVELSAQVGQL

SEQ ID NO: 1820 - protein, 20 aa, Homo sapiens
SQEIFLNLKTALEKYHDGIE

SEQ ID NO: 1821 - protein, 20 aa, Homo sapiens
NVGEVSTPFHIFKVKVTTER

SEQ ID NO: 1822 - protein, 20 aa, Homo sapiens
ATEELETYRKRAKDLKEFEK

SEQ ID NO: 1823 - protein, 20 aa, Homo sapiens
ELYQENEMKLHRKLTVEENY

SEQ ID NO: 1824 - protein, 20 aa, Homo sapiens
AFQDSVLEEEVELVLAPSEE

SEQ ID NO: 1825 - protein, 20 aa, Homo sapiens
TVMPRFAEQVEVAIEALSAN

SEQ ID NO: 1826 - protein, 20 aa, Homo sapiens
HLGTLNKVFASQWLNHRQVV

SEQ ID NO: 1827 - protein, 20 aa, Homo sapiens
KEALVPIQKATDSFHTELHP

SEQ ID NO: 1828 - protein, 20 aa, Homo sapiens
ASGALVGAASGSSAGGSSRG

SEQ ID NO: 1829 - protein, 20 aa, Homo sapiens
GDQDNWLRTNWVYRGEAERI

SEQ ID NO: 1830 - protein, 20 aa, Homo sapiens
ASHNGISYKDLDVIFGVELP

SEQ ID NO: 1831 - protein, 20 aa, Homo sapiens
ERLARILLQEIPIRSISLRS

SEQ ID NO: 1832 - protein, 20 aa, Homo sapiens
QGLEMRIKLWEEIKSAKYSE

SEQ ID NO: 1833 - protein, 20 aa, Homo sapiens
YAASVANAELVRVLLDRGAN

SEQ ID NO: 1834 - protein, 20 aa, Homo sapiens
PLPDSMKLESSHSRGSMTAL

SEQ ID NO: 1835 - protein, 20 aa, Homo sapiens
IQNAAVFQEAFEIVVRHAKN

SEQ ID NO: 1836 - protein, 20 aa, Homo sapiens
AFTITDQVPFSVSVSQLRAL

SEQ ID NO: 1837 - protein, 20 aa, Homo sapiens
FVNLKNITYLVLDEADKMLD

SEQ ID NO: 1838 - protein, 20 aa, Homo sapiens
RPDNMSEYSKQMQRFNVGED

SEQ ID NO: 1839 - protein, 20 aa, Homo sapiens
PTATQDQVQGTVTIRNISAL

SEQ ID NO: 1840 - protein, 20 aa, Homo sapiens
PYKYKLRYRYTLDDLYPMMN

SEQ ID NO: 1841 - protein, 20 aa, Homo sapiens
DQTPDENDQVVVKITGHFYA

SEQ ID NO: 1842 - protein, 20 aa, Homo sapiens
FHPGGLMKLRSREADLYRFI

SEQ ID NO: 1843 - protein, 20 aa, Homo sapiens
KDYSVSANSRIVIVTAGARQ

SEQ ID NO: 1844 - protein, 20 aa, Homo sapiens
NDFVNISSIGLTYFQSSNLQ

SEQ ID NO: 1845 - protein, 20 aa, Homo sapiens
GREHSAYGEPRKLLTQDLVQ

SEQ ID NO: 1846 - protein, 20 aa, Homo sapiens
LLTQDWVQENYLEYRQVPGS

SEQ ID NO: 1847 - protein, 20 aa, Homo sapiens
VGAQALQAEEQEAAFFSSTL

SEQ ID NO: 1848 - protein, 20 aa, Homo sapiens
SPQGASTLPTTINYTLWSQS

SEQ ID NO: 1849 - protein, 20 aa, Homo sapiens
REPVTKAEMLGSVVGNWQYF

SEQ ID NO: 1850 - protein, 20 aa, Homo sapiens
WVQENYLEYRQVPGSNPARY

SEQ ID NO: 1851 - protein, 20 aa, Homo sapiens
DSIFGDPKKLLTQYFVQENY

SEQ ID NO: 1852 - protein, 20 aa, Homo sapiens
QIKEPVTKAEMLESVIKNYK

SEQ ID NO: 1853 - protein, 20 aa, Homo sapiens
DGEEHLIYGEPRKFITQDLV

SEQ ID NO: 1854 - protein, 20 aa, Homo sapiens
VNPNGHTYTFIDKVDLTDEE

SEQ ID NO: 1855 - protein, 20 aa, Homo sapiens
KMKKPIMKADMLKIVQKSHK

SEQ ID NO: 1856 - protein, 20 aa, Homo sapiens
LKIISKKYKEHFPEIFRKVS

SEQ ID NO: 1857 - protein, 20 aa, Homo sapiens
GSPDAVVSYSKSDVAANGQD

SEQ ID NO: 1858 - protein, 20 aa, Homo sapiens
LQIPVSRSFSSTLLSIFQSS

SEQ ID NO: 1859 - protein, 20 aa, Homo sapiens
YTLDEKVAELVEFLLLKYEA

SEQ ID NO: 1860 - protein, 20 aa, Homo sapiens
LYRPRKYLYVTSSFKGAFKD

SEQ ID NO: 1861 - protein, 20 aa, Homo sapiens
RKKWLEEKMMLITQAKEAEN

SEQ ID NO: 1862 - protein, 20 aa, Homo sapiens
STLVHNGTSARATTTPASKS

SEQ ID NO: 1863 - protein, 20 aa, Homo sapiens
QELLVANFEKARRAHWIFLG

SEQ ID NO: 1864 - protein, 20 aa, Homo sapiens
QDFTEYKYTHQPNRFPDLMM

SEQ ID NO: 1865 - protein, 20 aa, Homo sapiens
KLESAWELGKVKGLKLEELW

SEQ ID NO: 1866 - protein, 20 aa, Homo sapiens
LQRKMNVDVSSTIYNNEVLH

SEQ ID NO: 1867 - protein, 20 aa, Homo sapiens
TIYVYQEGLVRFATEKFDLS

SEQ ID NO: 1868 - protein, 20 aa, Homo sapiens
DSLVERLHRQTAEYSAFKLE

SEQ ID NO: 1869 - protein, 20 aa, Homo sapiens
LETPQDYIRLWQELSDSLGP

SEQ ID NO: 1870 - protein, 20 aa, Homo sapiens
EAVEENGVITDKADIFAFGL

SEQ ID NO: 1871 - protein, 20 aa, Homo sapiens
QTESAGIQRAQIQKELWRIQ

SEQ ID NO: 1872 - protein, 20 aa, Homo sapiens
LSTNHFRLTSRPQWALYQYH

SEQ ID NO: 1873 - protein, 20 aa, Homo sapiens
KSMRFGMLKDHQAVTGNVTA

SEQ ID NO: 1874 - protein, 20 aa, Homo sapiens
LKFDTNFLSVPGRVLKNANI

SEQ ID NO: 1875 - protein, 20 aa, Homo sapiens
WGLHFGSQISLTGRIVPSEK

SEQ ID NO: 1876 - protein, 20 aa, Homo sapiens
PSVSQLSVLSLSGVMLTDVS

SEQ ID NO: 1877 - protein, 20 aa, Homo sapiens
SVYETYELVEKFYDPMFKYH

SEQ ID NO: 1878 - protein, 20 aa, Homo sapiens
RLNPHPNILMLHEVVFDRKS

SEQ ID NO: 1879 - protein, 20 aa, Homo sapiens
TIKEAARFKKVVLIQQLEKA

SEQ ID NO: 1880 - protein, 20 aa, Homo sapiens
ELTKVRMARQKMSEIFPLTE

SEQ ID NO: 1881 - protein, 20 aa, Homo sapiens
EELKGTEQELIGLLQAREKE

SEQ ID NO: 1882 - protein, 20 aa, Homo sapiens
EGVGVDINKALLAKRKRLEM

SEQ ID NO: 1883 - protein, 20 aa, Homo sapiens
QEESITVQTMMNTLRDKASG

SEQ ID NO: 1884 - protein, 20 aa, Homo sapiens
IPPRDKMEDNSALYESTSAH

SEQ ID NO: 1885 - protein, 20 aa, Homo sapiens
LKTIEKLALEKSYDISSGLV

SEQ ID NO: 1886 - protein, 20 aa, Homo sapiens
TSPTQNLFPASKTSPVNLPN

SEQ ID NO: 1887 - protein, 20 aa, Homo sapiens
PGNVKALLRRATTYKHQNKL

SEQ ID NO: 1888 - protein, 20 aa, Homo sapiens
SIKLKDSILSIVHVKGIVLV

SEQ ID NO: 1889 - protein, 20 aa, Homo sapiens
LASSSEVLASIENIIQDIIT

SEQ ID NO: 1890 - protein, 20 aa, Homo sapiens
QGHTSSEYDMLREMFSDSRS

SEQ ID NO: 1891 - protein, 20 aa, Homo sapiens
LWSKGTEILVNSSRVTVTPD

SEQ ID NO: 1892 - protein, 20 aa, Homo sapiens
IKIVDILEEEVVTFAVEVEL

SEQ ID NO: 1893 - protein, 20 aa, Homo sapiens
DESTSTLRPPTILPTLRSAL

SEQ ID NO: 1894 - protein, 20 aa, Homo sapiens
GEYFYSSTAQENLALETSSP

SEQ ID NO: 1895 - protein, 20 aa, Homo sapiens
LDKQRILTVDSFAASSTVPH

SEQ ID NO: 1896 - protein, 20 aa, Homo sapiens
EDTTLTITVPAVSRRVEELS

SEQ ID NO: 1897 - protein, 20 aa, Homo sapiens
AYDPKHFHNRVVRIMIDDHN

SEQ ID NO: 1898 - protein, 20 aa, Homo sapiens
SRDVAQFRNVVTQLEADLDI

SEQ ID NO: 1899 - protein, 20 aa, Homo sapiens
TTQTLPSTTMETQFPVSEGK

SEQ ID NO: 1900 - protein, 20 aa, Homo sapiens
LVERREEAQRAQQAVPGPGP

SEQ ID NO: 1901 - protein, 20 aa, Homo sapiens
KNGSTPMFNDINIYDLFVWM

SEQ ID NO: 1902 - protein, 20 aa, Homo sapiens
QRKFSRSDHLKTHTRTHTGK

SEQ ID NO: 1903 - protein, 20 aa, Homo sapiens
ENSRSMPKLEIFEKIESQRI

SEQ ID NO: 1904 - protein, 20 aa, Homo sapiens
HLPSLRQLDLSHNPLADLSP

SEQ ID NO: 1905 - protein, 20 aa, Homo sapiens
KEGREAVSQLQTDSEPKFHS

SEQ ID NO: 1906 - protein, 20 aa, Homo sapiens
TLEFAGQDLSAYLLKSLFKE

SEQ ID NO: 1907 - protein, 20 aa, Homo sapiens
QLYNHMGSDTTVVAQKVFQL

SEQ ID NO: 1908 - protein, 20 aa, Homo sapiens
VFTYTDQGAILEDQPFVQNN

SEQ ID NO: 1909 - protein, 20 aa, Homo sapiens
EYSRRHPQLAVSVILRVAKG

SEQ ID NO: 1910 - protein, 20 aa, Homo sapiens
MDTSTDPVRVLSWLRRDLEK

SEQ ID NO: 1911 - protein, 20 aa, Homo sapiens
SKIASEMAYEAVELTAAEMR

SEQ ID NO: 1912 - protein, 20 aa, Homo sapiens
ETVILGLLKTPAQYDASELK

SEQ ID NO: 1913 - protein, 20 aa, Homo sapiens
DKSKLWLLKDRDLARQKEQE

SEQ ID NO: 1914 - protein, 20 aa, Homo sapiens
PGTEQTEAVGGLSSKPATPK

SEQ ID NO: 1915 - protein, 20 aa, Homo sapiens
PVQEDMALNEVLQKLKHTNR

SEQ ID NO: 1916 - protein, 20 aa, Homo sapiens
HKEKDKGLQTTQNGRFYAIS

SEQ ID NO: 1917 - protein, 20 aa, Homo sapiens
PTLSDEKQWHDVSVYLGLTN

SEQ ID NO: 1918 - protein, 20 aa, Homo sapiens
DLSDNREKLASILKESLNLE

SEQ ID NO: 1919 - protein, 20 aa, Homo sapiens
ESSMLSTDTKKASILLIRKI

SEQ ID NO: 1920 - protein, 20 aa, Homo sapiens
TEIEFKIKLLEKDPYGLDVP

SEQ ID NO: 1921 - protein, 20 aa, Homo sapiens
IEEKSKLLEKFSLVQKEYEG

SEQ ID NO: 1922 - protein, 20 aa, Homo sapiens
TSGELVRHRRYKHTHEKPFK

SEQ ID NO: 1923 - protein, 20 aa, Homo sapiens
KKTRDLRRQLRKAVMDHISD

SEQ ID NO: 1924 - protein, 20 aa, Homo sapiens
PSLLKEREFHLGTLNKVFAS

SEQ ID NO: 1925 - protein, 20 aa, Homo sapiens
EHQLGNNTLSSHLQIDKMTD

SEQ ID NO: 1926 - protein, 20 aa, Homo sapiens
GSSRGGGSGSGASDLGAGSK

SEQ ID NO: 1927 - protein, 20 aa, Homo sapiens
LEGRSTTSLSVSWSIPPPQQ

SEQ ID NO: 1928 - protein, 20 aa, Homo sapiens
PTMEVKPKDIIHVVKDQLIG

SEQ ID NO: 1929 - protein, 20 aa, Homo sapiens
RPSRVHASEVESAVWYVKKF

SEQ ID NO: 1930 - protein, 20 aa, Homo sapiens
FIKRNIELAKESRNPVVMVD

SEQ ID NO: 1931 - protein, 20 aa, Homo sapiens
TQVVALLVAHGAEVNTQDEN

SEQ ID NO: 1932 - protein, 20 aa, Homo sapiens
KDNEISTFHNLGNVHSPLKL

SEQ ID NO: 1933 - protein, 20 aa, Homo sapiens
DIVQGIESAEILQAVPSGEG

SEQ ID NO: 1934 - protein, 20 aa, Homo sapiens
GSTDNNVVAGDRPLIDWDQI

SEQ ID NO: 1935 - protein, 20 aa, Homo sapiens
GSVAGAVKLNRQQTDMAVNW

SEQ ID NO: 1936 - protein, 20 aa, Homo sapiens
RGSSPQVMSRSNGSVSRKPR

SEQ ID NO: 1937 - protein, 20 aa, Homo sapiens
LPEIQELYQTLLAKPSPAQQ

SEQ ID NO: 1938 - protein, 20 aa, Homo sapiens
SDLESIFKDAKIPVSGPFLV

SEQ ID NO: 1939 - protein, 20 aa, Homo sapiens
SPLRSANTVVQSKAALAVTA

SEQ ID NO: 1940 - protein, 20 aa, Homo sapiens
QHGSLFFSTSKITSGKDYSV

SEQ ID NO: 1941 - protein, 20 aa, Homo sapiens
PRLGYQAKLFKGVLKERMEG

SEQ ID NO: 1942 - protein, 20 aa, Homo sapiens
YRQVPDSDPARYEFLWGPRA

SEQ ID NO: 1943 - protein, 20 aa, Homo sapiens
YRQVPGSDPARYEFLWGPRA

SEQ ID NO: 1944 - protein, 20 aa, Homo sapiens
YEFLWGPRAHAETSKMKVLE

SEQ ID NO: 1945 - protein, 20 aa, Homo sapiens
ILGDPKKLLTQHFVQENYLE

SEQ ID NO: 1946 - protein, 20 aa, Homo sapiens
ASESLKMIFGIDVKEVDPAS

SEQ ID NO: 1947 - protein, 20 aa, Homo sapiens
SVMGLYDGREHSVYWKLRKL

SEQ ID NO: 1948 - protein, 20 aa, Homo sapiens
YKMREPIMKADMLKVVDEKY

SEQ ID NO: 1949 - protein, 20 aa, Homo sapiens
DGEEHSVFGEPWKLITKDLV

SEQ ID NO: 1950 - protein, 20 aa, Homo sapiens
KVDSTKDSYVLVSKMDLPNN

SEQ ID NO: 1951 - protein, 20 aa, Homo sapiens
NPTTHSYILVSMLGPNDGNQ

SEQ ID NO: 1952 - protein, 20 aa, Homo sapiens
LDEKVDELARFLLLKYQVKQ

SEQ ID NO: 1953 - protein, 20 aa, Homo sapiens
QATIDTADDATVMASESLSV

SEQ ID NO: 1954 - protein, 20 aa, Homo sapiens
FNQIQNTYMVQYEKKIKRKL

SEQ ID NO: 1955 - protein, 20 aa, Homo sapiens
RTLDSVSQISNIDLLNLRDL

SEQ ID NO: 1956 - protein, 20 aa, Homo sapiens
HNGTSARATTTPASKSTPFS

SEQ ID NO: 1957 - protein, 20 aa, Homo sapiens
MAASFFSDFGLMWYLEELKK

SEQ ID NO: 1958 - protein, 20 aa, Homo sapiens
LQMGMNRKAIREDGMPGGRN

SEQ ID NO: 1959 - protein, 20 aa, Homo sapiens
DGYTRNWFKVTIPYGIKYDK

SEQ ID NO: 1960 - protein, 20 aa, Homo sapiens
IDIHFLERKMQHHLLKEKNE

SEQ ID NO: 1961 - protein, 20 aa, Homo sapiens
RTTTPAFTLNIPSEANHTEQ

SEQ ID NO: 1962 - protein, 20 aa, Homo sapiens
ITPPSSEKLVSVMRLSDLST

SEQ ID NO: 1963 - protein, 20 aa, Homo sapiens
SSTVFLDTMPESPALSLQDF

SEQ ID NO: 1964 - protein, 20 aa, Homo sapiens
KERPISMINEASNYNVTSDY

SEQ ID NO: 1965 - protein, 20 aa, Homo sapiens
PLDNWLLIYTRRNYEAANSL

SEQ ID NO: 1966 - protein, 20 aa, Homo sapiens
DRIETYVRTIQSTLGAEGKI

SEQ ID NO: 1967 - protein, 20 aa, Homo sapiens
DGDANSYIDTLRKYTRPTLQ

SEQ ID NO: 1968 - protein, 20 aa, Homo sapiens
GQLKTLIEYEVPQLLSSVAE

SEQ ID NO: 1969 - protein, 20 aa, Homo sapiens
TSPRRLVELAGQSLLKDEAL

SEQ ID NO: 1970 - protein, 20 aa, Homo sapiens
PHLAGTEQNFQLAKQIQSQW

SEQ ID NO: 1971 - protein, 20 aa, Homo sapiens
NFDFPFKKGSGIPLLTTNLS

SEQ ID NO: 1972 - protein, 20 aa, Homo sapiens
AMSSRDLYATITHSVREEKM

SEQ ID NO: 1973 - protein, 20 aa, Homo sapiens
AATEAPKMSNADFAKLFLRK

SEQ ID NO: 1974 - protein, 20 aa, Homo sapiens
EVEKAKVIADEAVKLQKEID

SEQ ID NO: 1975 - protein, 20 aa, Homo sapiens
SGKPSVEDQFTRAYDFETED

SEQ ID NO: 1976 - protein, 20 aa, Homo sapiens
EHPELRSYAQSQGWWTGEGE

SEQ ID NO: 1977 - protein, 20 aa, Homo sapiens
LKIKLQASREAGAAALRNVA

SEQ ID NO: 1978 - protein, 20 aa, Homo sapiens
SGSQDEVSRGVEPLEAARAQ

SEQ ID NO: 1979 - protein, 20 aa, Homo sapiens
PERRKGSLADVVDTLKQKKL

SEQ ID NO: 1980 - protein, 20 aa, Homo sapiens
DTFLLLIQSLKNNLIEKDPS

SEQ ID NO: 1981 - protein, 20 aa, Homo sapiens
NQYKERLMELQEAVRWTEMI

SEQ ID NO: 1982 - protein, 20 aa, Homo sapiens
VTDAKFVLIVEKDATFQRLL

SEQ ID NO: 1983 - protein, 20 aa, Homo sapiens
DRGSETTYESSADIAGDEGT

SEQ ID NO: 1984 - protein, 20 aa, Homo sapiens
GGAPGELIVNWTPMSREYQN

SEQ ID NO: 1985 - protein, 20 aa, Homo sapiens
GDGSWYRALVKEILPNGHVK

SEQ ID NO: 1986 - protein, 20 aa, Homo sapiens
EEAEHLFETLSDQMWRQFTD

SEQ ID NO: 1987 - protein, 20 aa, Homo sapiens
QAIIQGFSYDLLKKIDSPQR

SEQ ID NO: 1988 - protein, 20 aa, Homo sapiens
LKKAHRRVHTSLQLITKVGE

SEQ ID NO: 1989 - protein, 20 aa, Homo sapiens
TPVWPIPRSSLEYRASSRLK

SEQ ID NO: 1990 - protein, 20 aa, Homo sapiens
RRILFIKHFIIYSIPRYVRD

SEQ ID NO: 1991 - protein, 20 aa, Homo sapiens
LLYEQAQEEITRLRREMMKS

SEQ ID NO: 1992 - protein, 20 aa, Homo sapiens
IMHSRYRAQRFWSWVGQAND

SEQ ID NO: 1993 - protein, 20 aa, Homo sapiens
AVQVELEPVNAQARKAFSRQ

SEQ ID NO: 1994 - protein, 20 aa, Homo sapiens
HPTNPNLLSPASFFSSWQIV

SEQ ID NO: 1995 - protein, 20 aa, Homo sapiens
GHTPSHHAAQFPNHSFKHED

SEQ ID NO: 1996 - protein, 20 aa, Homo sapiens
FAESSDLTRHRRIHTGERPF

SEQ ID NO: 1997 - protein, 20 aa, Homo sapiens
HMADMVTWLKETEVVQGKDR

SEQ ID NO: 1998 - protein, 20 aa, Homo sapiens
SQASYKIVIEGKPYTVNLMQ

SEQ ID NO: 1999 - protein, 20 aa, Homo sapiens
IWTNKNLIVVDDVRKSVHLY

SEQ ID NO: 2000 - protein, 20 aa, Homo sapiens
ESRTLHRNEYGIASILDSYQ

SEQ ID NO: 2001 - protein, 20 aa, Homo sapiens
VSDLIDSFLRNLHSVTGTLM

SEQ ID NO: 2002 - protein, 20 aa, Homo sapiens
SIDDLSFYVNRLSSLVIQMA

SEQ ID NO: 2003 - protein, 20 aa, Homo sapiens
MKGKGTRDKVLIRIMVSRSE

SEQ ID NO: 2004 - protein, 20 aa, Homo sapiens
SATEKVFKQQEIPSVFPKTS

SEQ ID NO: 2005 - protein, 20 aa, Homo sapiens
PADPAQLAAQMLGKVSSIHS

SEQ ID NO: 2006 - protein, 20 aa, Homo sapiens
ALIQPVDTISISSLRQFETV

SEQ ID NO: 2007 - protein, 20 aa, Homo sapiens
IDQKNLNGKSQYYIMFGPDI

SEQ ID NO: 2008 - protein, 20 aa, Homo sapiens
AVHQQQLLSWEEDRQKVLTL

SEQ ID NO: 2009 - protein, 20 aa, Homo sapiens
LQQSLNQDFHQKTIVLQEGN

SEQ ID NO: 2010 - protein, 20 aa, Homo sapiens
LQESQKQLLQEAEVWKEQVS

SEQ ID NO: 2011 - protein, 20 aa, Homo sapiens
EEPGVTPQPYLGLLLEELRR

SEQ ID NO: 2012 - protein, 20 aa, Homo sapiens
VLQFHALEENVMVASEDSKL

SEQ ID NO: 2013 - protein, 20 aa, Homo sapiens
RDEMAAARGALKKNATMLYT

SEQ ID NO: 2014 - protein, 20 aa, Homo sapiens
QNETSYSRVLHGYAAQQLPS

SEQ ID NO: 2015 - protein, 20 aa, Homo sapiens
RLFLKGNLLRGIDSLFSAPM

SEQ ID NO: 2016 - protein, 20 aa, Homo sapiens
NSYNVRRTEGFSVTLDDLAP

SEQ ID NO: 2017 - protein, 20 aa, Homo sapiens
FGVELPGNEEFQVVKDAVLD

SEQ ID NO: 2018 - protein, 20 aa, Homo sapiens
LSKSNNRLKSLSIQYLELDR

SEQ ID NO: 2019 - protein, 20 aa, Homo sapiens
QLAEIDIKLQELSAASPTIS

SEQ ID NO: 2020 - protein, 20 aa, Homo sapiens
TKLEISGDEFLNFLLKLNKQ

SEQ ID NO: 2021 - protein, 20 aa, Homo sapiens
DKYWREYILSLEELVNGMYR

SEQ ID NO: 2022 - protein, 20 aa, Homo sapiens
RNQPLTFALQLHDPSGYLAE

SEQ ID NO: 2023 - protein, 20 aa, Homo sapiens
GTLDLVAVSSVKQNIIVTTE

SEQ ID NO: 2024 - protein, 20 aa, Homo sapiens
PHAPGVQMQAIPEDAVHEDS

SEQ ID NO: 2025 - protein, 20 aa, Homo sapiens
SSNAYNSRYWSNNPKVHRNT

SEQ ID NO: 2026 - protein, 20 aa, Homo sapiens
AKINKKKSLVSFKALIEESE

SEQ ID NO: 2027 - protein, 20 aa, Homo sapiens
NDIASMNLQAHLIPGLNLNA

SEQ ID NO: 2028 - protein, 20 aa, Homo sapiens
LLGSENDGTKIAASQAISAM

SEQ ID NO: 2029 - protein, 20 aa, Homo sapiens
ETRLALVQRNVAIMKSIIPA

SEQ ID NO: 2030 - protein, 20 aa, Homo sapiens
LQNFVRILLNEEDMNVIVVD

SEQ ID NO: 2031 - protein, 20 aa, Homo sapiens
QGASAFPTTINFTRQRQPSE

SEQ ID NO: 2032 - protein, 20 aa, Homo sapiens
ITKAEILESVIRNYEDHFPL

SEQ ID NO: 2033 - protein, 20 aa, Homo sapiens
FGEPKRLLTQNWVQEKYLVY

SEQ ID NO: 2034 - protein, 20 aa, Homo sapiens
ASEEEIWEELGVMGVYDGRE

SEQ ID NO: 2035 - protein, 20 aa, Homo sapiens
KLVHFLLLKYRAREPVTKAE

SEQ ID NO: 2036 - protein, 20 aa, Homo sapiens
MLLGQKSQRYKAEEGLQAQG

SEQ ID NO: 2037 - protein, 20 aa, Homo sapiens
NLSNDWDFPRNGLLMPLLGV

SEQ ID NO: 2038 - protein, 20 aa, Homo sapiens
SLLSSWDFPRRKLLMPLLGV

SEQ ID NO: 2039 - protein, 20 aa, Homo sapiens
VDVSYKKSYKGANSKIEKKQ

SEQ ID NO: 2040 - protein, 20 aa, Homo sapiens
ARPRVAARRGTTAMTSAYSR

SEQ ID NO: 2041 - protein, 20 aa, Homo sapiens
PQSPLQGEEFQSSLQSPVSI

SEQ ID NO: 2042 - protein, 20 aa, Homo sapiens
ASEEVIWEVLNAVGVYAGRE

SEQ ID NO: 2043 - protein, 20 aa, Homo sapiens
HESLSSFELSASRRGQKRNI

SEQ ID NO: 2044 - protein, 20 aa, Homo sapiens
VKDLLKGQSRLIFTYGLTNS

SEQ ID NO: 2045 - protein, 20 aa, Homo sapiens
PPLTSSNHSTSPQLSTGVSF

SEQ ID NO: 2046 - protein, 20 aa, Homo sapiens
EVLFYQPDLKYLSFTLTKLS

SEQ ID NO: 2047 - protein, 20 aa, Homo sapiens
KENFTGSETLKHLVLQFLQQ

SEQ ID NO: 2048 - protein, 20 aa, Homo sapiens
QEKENKYFEDIKILKEKNAE

SEQ ID NO: 2049 - protein, 20 aa, Homo sapiens
SWDVDDLLLWKKIHRMVILT

SEQ ID NO: 2050 - protein, 20 aa, Homo sapiens
EKSEEYAEQLHVQLADKDLY

SEQ ID NO: 2051 - protein, 20 aa, Homo sapiens
QKQPNTLRHVVIPDLQSSEA

SEQ ID NO: 2052 - protein, 20 aa, Homo sapiens
RGTTEIGMIGSKPFSTVKYK

SEQ ID NO: 2053 - protein, 20 aa, Homo sapiens
KSIGRGYNPRLTVIVVKKRV

SEQ ID NO: 2054 - protein, 20 aa, Homo sapiens
YHDPSRGMRSVVGFVASINL

SEQ ID NO: 2055 - protein, 20 aa, Homo sapiens
SPNNFTLAFIVVKKRINTRF

SEQ ID NO: 2056 - protein, 20 aa, Homo sapiens
MSGRARVKARGIARSPSATE

SEQ ID NO: 2057 - protein, 20 aa, Homo sapiens
DVLLAQEVRPRRWKLQVLDL

SEQ ID NO: 2058 - protein, 20 aa, Homo sapiens
KFSGYPLYHSVYETYELVEK

SEQ ID NO: 2059 - protein, 20 aa, Homo sapiens
RSVYSKQPYTEYISTRWYRA

SEQ ID NO: 2060 - protein, 20 aa, Homo sapiens
KMENVQPAPDNVLLTLRPRR

SEQ ID NO: 2061 - protein, 20 aa, Homo sapiens
LALWEAYREFESAIVEAARL

SEQ ID NO: 2062 - protein, 20 aa, Homo sapiens
TEKENKMKDLTFLLEESRDK

SEQ ID NO: 2063 - protein, 20 aa, Homo sapiens
EYSQQFLTLFQQWDLDMQKA

SEQ ID NO: 2064 - protein, 20 aa, Homo sapiens
AHEWARAIIESDQEQGRKLR

SEQ ID NO: 2065 - protein, 20 aa, Homo sapiens
QDLQREISILQEQISHLQFV

SEQ ID NO: 2066 - protein, 20 aa, Homo sapiens
IKEGLITADAEGDFIDARPG

SEQ ID NO: 2067 - protein, 20 aa, Homo sapiens
DQDTVMKAIQEARKMREQIQ

SEQ ID NO: 2068 - protein, 20 aa, Homo sapiens
QLANDSVNRLSRILMELDGP

SEQ ID NO: 2069 - protein, 20 aa, Homo sapiens
DVLQGELEAVKQAKLKLEEK

SEQ ID NO: 2070 - protein, 20 aa, Homo sapiens
TAVAVPSNIQGIRNLVTDAK

SEQ ID NO: 2071 - protein, 20 aa, Homo sapiens
SEEYLERQLQAEFIESGQYR

SEQ ID NO: 2072 - protein, 20 aa, Homo sapiens
KWDPVVPFRNESAVTGYKML

SEQ ID NO: 2073 - protein, 20 aa, Homo sapiens
KYTSDDFWYRAVVLGTSDTD

SEQ ID NO: 2074 - protein, 20 aa, Homo sapiens
YRYLNSWRPSLFYKIANVQT

SEQ ID NO: 2075 - protein, 20 aa, Homo sapiens
TGLKRLSSFIGAGSPSLVKA

SEQ ID NO: 2076 - protein, 20 aa, Homo sapiens
NDKNSKVLMQNAATYWNELP

SEQ ID NO: 2077 - protein, 20 aa, Homo sapiens
RKRRRRRRLMELAEPKINWQ

SEQ ID NO: 2078 - protein, 20 aa, Homo sapiens
QVKHLYNWNLPPRRILFIKH

SEQ ID NO: 2079 - protein, 20 aa, Homo sapiens
IKLDSSKELLNRQLVAKDQE

SEQ ID NO: 2080 - protein, 20 aa, Homo sapiens
ADGMWPQFRTIQEKEVIILN

SEQ ID NO: 2081 - protein, 20 aa, Homo sapiens
FFNWFSDHNFAGSNKIAEIL

SEQ ID NO: 2082 - protein, 20 aa, Homo sapiens
PWHRLFLLRWEQEIQKLTGD

SEQ ID NO: 2083 - protein, 20 aa, Homo sapiens
LQPVETKAHFDSSEPQLLWD

SEQ ID NO: 2084 - protein, 20 aa, Homo sapiens
YLPRDVLAQLPSLRHLDLSN

SEQ ID NO: 2085 - protein, 20 aa, Homo sapiens
SIIKEGIESQASYKIVIEGK

SEQ ID NO: 2086 - protein, 20 aa, Homo sapiens
KVLLFGLEIWTNKNLIVVDD

SEQ ID NO: 2087 - protein, 20 aa, Homo sapiens
EGLSPNLNRFLGDRDFNQFS

SEQ ID NO: 2088 - protein, 20 aa, Homo sapiens
AQDKAESYSLISMKGMGDPK

SEQ ID NO: 2089 - protein, 20 aa, Homo sapiens
RNQSLEFSTMKAEMKERDKG

SEQ ID NO: 2090 - protein, 20 aa, Homo sapiens
AKGRRAEDGSVIDYELIDQD

SEQ ID NO: 2091 - protein, 20 aa, Homo sapiens
PSVFPKTSISPLNVVQGASV

SEQ ID NO: 2092 - protein, 20 aa, Homo sapiens
YRGNTTMDIKDLVKQFHQIK

SEQ ID NO: 2093 - protein, 20 aa, Homo sapiens
ERPEIVSTWSSAGISWRSEA

SEQ ID NO: 2094 - protein, 20 aa, Homo sapiens
TQNGRFYAISARFKPFSNKG

SEQ ID NO: 2095 - protein, 20 aa, Homo sapiens
QERTNSELHNLRQIYVKQQS

SEQ ID NO: 2096 - protein, 20 aa, Homo sapiens
YAKIDEKTAELKRKMFKMST

SEQ ID NO: 2097 - protein, 20 aa, Homo sapiens
EEKLSKVDEMISHATEELET

SEQ ID NO: 2098 - protein, 20 aa, Homo sapiens
LLLEELRRVVAALPEGMRPD

SEQ ID NO: 2099 - protein, 20 aa, Homo sapiens
QEGVQVVVQQPGPGLLWLEE

SEQ ID NO: 2100 - protein, 20 aa, Homo sapiens
PKSLEIRTLTVERLLEPLVT

SEQ ID NO: 2101 - protein, 20 aa, Homo sapiens
NTLFVVDVQTSQITKIPILK

SEQ ID NO: 2102 - protein, 20 aa, Homo sapiens
AAPIHDADAQESSLGLTGLQ

SEQ ID NO: 2103 - protein, 20 aa, Homo sapiens
GKIPIRWTAPEAISYRKFTS

SEQ ID NO: 2104 - protein, 20 aa, Homo sapiens
LKFVSSLRRQFEFSVDSFQI

SEQ ID NO: 2105 - protein, 20 aa, Homo sapiens
AKLARQATNLKVNFFFERIM

SEQ ID NO: 2106 - protein, 20 aa, Homo sapiens
TQIPPEEYEMQMQKLNKDFT

SEQ ID NO: 2107 - protein, 20 aa, Homo sapiens
IAKRNKHHEIFNLLSFTLNP

SEQ ID NO: 2108 - protein, 20 aa, Homo sapiens
NYTNAMFKNNYPSLTPQAFE

SEQ ID NO: 2109 - protein, 20 aa, Homo sapiens
VNNTIINGSQVWGGQPVYPQ

SEQ ID NO: 2110 - protein, 20 aa, Homo sapiens
KTGKVRILIATDLASRGLDV

SEQ ID NO: 2111 - protein, 20 aa, Homo sapiens
DVDKLHFTPRIQRLNELEAQ

SEQ ID NO: 2112 - protein, 20 aa, Homo sapiens
GPPEAQFKAQGRIYGKIKEE

SEQ ID NO: 2113 - protein, 20 aa, Homo sapiens
LANMSAEYTSKVQIFEHGGL

SEQ ID NO: 2114 - protein, 20 aa, Homo sapiens
GTDSDKEHWKNIHKQVIQSA

SEQ ID NO: 2115 - protein, 20 aa, Homo sapiens
LEFSQLSVKDSFRDLFIPRI

SEQ ID NO: 2116 - protein, 20 aa, Homo sapiens
ALAETSYVKVLEYVIKVSAR

SEQ ID NO: 2117 - protein, 20 aa, Homo sapiens
ESVIRNYEDHFPLLFSEASE

SEQ ID NO: 2118 - protein, 20 aa, Homo sapiens
RAHAETSKMKVLEYIANANG

SEQ ID NO: 2119 - protein, 20 aa, Homo sapiens
PDAESLFREALSNKVDELAH

SEQ ID NO: 2120 - protein, 20 aa, Homo sapiens
DLESEFQAALSRKVAKLVHF

SEQ ID NO: 2121 - protein, 20 aa, Homo sapiens
EEIWKFMNVLGAYDGEEHLI

SEQ ID NO: 2122 - protein, 20 aa, Homo sapiens
RGQKSKLRAREKRRKARDET

SEQ ID NO: 2123 - protein, 20 aa, Homo sapiens
EFLNKMRIYDGKKHFIFGEP

SEQ ID NO: 2124 - protein, 20 aa, Homo sapiens
GEPRKLITQDLVQEKYLEYQ

SEQ ID NO: 2125 - protein, 20 aa, Homo sapiens
DDSTATESASSSVMSPSFSS

SEQ ID NO: 2126 - protein, 20 aa, Homo sapiens
LLVIYNLKLLLNGEPELDVK

SEQ ID NO: 2127 - protein, 20 aa, Homo sapiens
LPRTLNVLFDSLQERLYTKM

SEQ ID NO: 2128 - protein, 20 aa, Homo sapiens
LFEMQDPAFVKQAVNLLQEA

SEQ ID NO: 2129 - protein, 20 aa, Homo sapiens
FFVQDASAASALKDVSYKIY

SEQ ID NO: 2130 - protein, 20 aa, Homo sapiens
KKEIAMLKLEIATLKHQYQE

SEQ ID NO: 2131 - protein, 20 aa, Homo sapiens
LTFVMPNDYTKFVAEYFQER

SEQ ID NO: 2132 - protein, 20 aa, Homo sapiens
EMDGAAAAKQVMALKDTIGK

SEQ ID NO: 2133 - protein, 20 aa, Homo sapiens
KDEVYQKIILKFPLLNSETH

SEQ ID NO: 2134 - protein, 20 aa, Homo sapiens
NLRDNPFRTTQTRRRDDKEL

SEQ ID NO: 2135 - protein, 20 aa, Homo sapiens
QETAQLVGSTASQQPGYIQP

SEQ ID NO: 2136 - protein, 20 aa, Homo sapiens
AMDQARELVNMLEKIAGPIG

SEQ ID NO: 2137 - protein, 20 aa, Homo sapiens
SHREAMSLKGHLQSVTAPMG

SEQ ID NO: 2138 - protein, 20 aa, Homo sapiens
ARLVDNIQRNTNARFELETW

SEQ ID NO: 2139 - protein, 20 aa, Homo sapiens
SQLTTLSFYGNSISISALQS

SEQ ID NO: 2140 - protein, 20 aa, Homo sapiens
WNLLHETDSAVATARRPRWL

SEQ ID NO: 2141 - protein, 20 aa, Homo sapiens
GEGTFSEVMKMQSLRDGNYY

SEQ ID NO: 2142 - protein, 20 aa, Homo sapiens
MSTRDQYAAVTHNIREEKIN

SEQ ID NO: 2143 - protein, 20 aa, Homo sapiens
LDRQLKVKDLVLSVHNRAIR

SEQ ID NO: 2144 - protein, 20 aa, Homo sapiens
QENRKIIEAQRKAIQELQFG

SEQ ID NO: 2145 - protein, 20 aa, Homo sapiens
MFRQQQKILQQSRIVQSQRL

SEQ ID NO: 2146 - protein, 20 aa, Homo sapiens
SLDLLMKKIKGKDLQLLEMN

SEQ ID NO: 2147 - protein, 20 aa, Homo sapiens
EPHIKRPMNAFMVWAKDERR

SEQ ID NO: 2148 - protein, 20 aa, Homo sapiens
IIEAKMELEEVTRLLNLKDK

SEQ ID NO: 2149 - protein, 20 aa, Homo sapiens
SVTKAERSHLIVWQVMYGNE

SEQ ID NO: 2150 - protein, 20 aa, Homo sapiens
ITGKGVPDLNTRLLVKKLWD

SEQ ID NO: 2151 - protein, 20 aa, Homo sapiens
PLKNVRKKRFRKTQKKVPDV

SEQ ID NO: 2152 - protein, 20 aa, Homo sapiens
SSSLSIKWDPVVPFRNESAV

SEQ ID NO: 2153 - protein, 20 aa, Homo sapiens
QKKAHVLYIDYGNEEIIPLN

SEQ ID NO: 2154 - protein, 20 aa, Homo sapiens
ELDRLLTENQNLETVKRRLE

SEQ ID NO: 2155 - protein, 20 aa, Homo sapiens
FDDWDWQNGSLSSLSLPEST

SEQ ID NO: 2156 - protein, 20 aa, Homo sapiens
QHSVEYEGNIHTSLAIAQKL

SEQ ID NO: 2157 - protein, 20 aa, Homo sapiens
AAQMAVPSSRILQLSKPKAP

SEQ ID NO: 2158 - protein, 20 aa, Homo sapiens
DIKLLRNIPRWTHLLRLLRL

SEQ ID NO: 2159 - protein, 20 aa, Homo sapiens
EESENRQMMEQLRKANEDAE

SEQ ID NO: 2160 - protein, 20 aa, Homo sapiens
SAKEGTAFRMEAVQEGAAGV

SEQ ID NO: 2161 - protein, 20 aa, Homo sapiens
TERRLLVRRNIFDLSAPEKD

SEQ ID NO: 2162 - protein, 20 aa, Homo sapiens
AQDEGFGKILTHKNTVRGEI

SEQ ID NO: 2163 - protein, 20 aa, Homo sapiens
SSSAPFLASAVSAQPPLPDQ

SEQ ID NO: 2164 - protein, 20 aa, Homo sapiens
GLRGVLQFENVSYGIEPLES

SEQ ID NO: 2165 - protein, 20 aa, Homo sapiens
EIPNMSDHTTVHWARFNDIM

SEQ ID NO: 2166 - protein, 20 aa, Homo sapiens
VMKNFGTRTFQAITVTKLSQ

SEQ ID NO: 2167 - protein, 20 aa, Homo sapiens
GRRDARSFVEAAGTTNFPAN

SEQ ID NO: 2168 - protein, 20 aa, Homo sapiens
NRLSSLVIQMAHKEIKEKLE

SEQ ID NO: 2169 - protein, 20 aa, Homo sapiens
LYYYIQQDTKGDYQKALLYL

SEQ ID NO: 2170 - protein, 20 aa, Homo sapiens
SSDELFNQFRKAAIEKEVKA

SEQ ID NO: 2171 - protein, 20 aa, Homo sapiens
IKIGSEKSLHLEVEITSIVS

SEQ ID NO: 2172 - protein, 20 aa, Homo sapiens
ESRNDKEMLQLQFKKIKANY

SEQ ID NO: 2173 - protein, 20 aa, Homo sapiens
KIDGQSIESGSIEYDWNLTS

SEQ ID NO: 2174 - protein, 20 aa, Homo sapiens
NQKSLFKDQKFEAMLVQQNR

SEQ ID NO: 2175 - protein, 20 aa, Homo sapiens
AHQEALMKLERLDSVPVEEQ

SEQ ID NO: 2176 - protein, 20 aa, Homo sapiens
SENQKLQQKLKVMTELYQEN

SEQ ID NO: 2177 - protein, 20 aa, Homo sapiens
MKLHRKLTVEENYRLEKEEK

SEQ ID NO: 2178 - protein, 20 aa, Homo sapiens
SYASRDTYKLKRHMRTHSGE

SEQ ID NO: 2179 - protein, 20 aa, Homo sapiens
QVEVAIEALSANVPQPFEEN

SEQ ID NO: 2180 - protein, 20 aa, Homo sapiens
KSDARHNVSRVPVYAHITHK

SEQ ID NO: 2181 - protein, 20 aa, Homo sapiens
HTELHPRVAFWIIKLPRRRS

SEQ ID NO: 2182 - protein, 20 aa, Homo sapiens
GTNFQKRLFTKIDTIAPDEI

SEQ ID NO: 2183 - protein, 20 aa, Homo sapiens
KESYPVVVAESMYGDFQEAM

SEQ ID NO: 2184 - protein, 20 aa, Homo sapiens
NPYNAVLTKKFQVTMRGLLS

SEQ ID NO: 2185 - protein, 20 aa, Homo sapiens
AWQSKEEMENTKKFLSLTAV

SEQ ID NO: 2186 - protein, 20 aa, Homo sapiens
GAEVNTQDENGYTALTWAAR

SEQ ID NO: 2187 - protein, 20 aa, Homo sapiens
KVFGNFPKLIMTQVSKSLQV

SEQ ID NO: 2188 - protein, 20 aa, Homo sapiens
FSVPQLPHSSSHWLRLPRIF

SEQ ID NO: 2189 - protein, 20 aa, Homo sapiens
LKNITYLVLDEADKMLDMGF

SEQ ID NO: 2190 - protein, 20 aa, Homo sapiens
QTRVKLNFLDQIAKYWELQG

SEQ ID NO: 2191 - protein, 20 aa, Homo sapiens
HSVPKRQRIRKLQIRNIPPH

SEQ ID NO: 2192 - protein, 20 aa, Homo sapiens
GSKDFFNNQGIPQLIQLLKS

SEQ ID NO: 2193 - protein, 20 aa, Homo sapiens
MSTVKEQLIEKLIEDDENSQ

SEQ ID NO: 2194 - protein, 20 aa, Homo sapiens
AKFVDVIHSDSNGLGIQEPL

SEQ ID NO: 2195 - protein, 20 aa, Homo sapiens
HAEIRKMSLLKFLAKVNGSD

SEQ ID NO: 2196 - protein, 20 aa, Homo sapiens
VYAGREHFLFGEPKRLLTQN

SEQ ID NO: 2197 - protein, 20 aa, Homo sapiens
KISGGPRISYPLLHEWALRE

SEQ ID NO: 2198 - protein, 20 aa, Homo sapiens
RSSVRARRRTTATTFRARSR

SEQ ID NO: 2199 - protein, 20 aa, Homo sapiens
VDLTDEESLLSSWDFPRRKL

SEQ ID NO: 2200 - protein, 20 aa, Homo sapiens
RGQTQDHQGAQITATNKKKV

SEQ ID NO: 2201 - protein, 20 aa, Homo sapiens
AEKEESPSSSSSVLRDTASS

SEQ ID NO: 2202 - protein, 20 aa, Homo sapiens
RTHSTFEGFPQSLLQIPMTS

SEQ ID NO: 2203 - protein, 20 aa, Homo sapiens
PMEDVNLSSGHIARVSVSGS

SEQ ID NO: 2204 - protein, 20 aa, Homo sapiens
ENNEGLRAFLLTIENELKNE

SEQ ID NO: 2205 - protein, 20 aa, Homo sapiens
YQPDLKYLSFTLTKLSRDDI

SEQ ID NO: 2206 - protein, 20 aa, Homo sapiens
TIPYGIKYDKAWLMNSIQSH

SEQ ID NO: 2207 - protein, 20 aa, Homo sapiens
LQSKNMWLQQQLVHAHKKAD

SEQ ID NO: 2208 - protein, 20 aa, Homo sapiens
RGKAPDPQAGNFVLVFPFNE

SEQ ID NO: 2209 - protein, 20 aa, Homo sapiens
HKAEVEAIMEQLKELKQKGD

SEQ ID NO: 2210 - protein, 20 aa, Homo sapiens
HDAIQNQQNALELMMDHLQK

SEQ ID NO: 2211 - protein, 20 aa, Homo sapiens
RSWTYGITRGGRVFFINEEA

SEQ ID NO: 2212 - protein, 20 aa, Homo sapiens
GLTDKMRNDFNVMKDLAVHT

SEQ ID NO: 2213 - protein, 20 aa, Homo sapiens
ENYQPKMVVFVVQKKISTNL

SEQ ID NO: 2214 - protein, 20 aa, Homo sapiens
FRRTFKLLDFEQVGRNYYTK

SEQ ID NO: 2215 - protein, 20 aa, Homo sapiens
SATEVGRIQASPLPRSVDLS

SEQ ID NO: 2216 - protein, 20 aa, Homo sapiens
MPMQDIKMILKMVQLDSIED

SEQ ID NO: 2217 - protein, 20 aa, Homo sapiens
FLDELKAENIKKFLYNFTQI

SEQ ID NO: 2218 - protein, 20 aa, Homo sapiens
TPAQKILTKFKQSRAMNFDF

SEQ ID NO: 2219 - protein, 20 aa, Homo sapiens
NNSQPAPGNILSTAPPWLRH

SEQ ID NO: 2220 - protein, 20 aa, Homo sapiens
ESDGDEYAMASSAESSPGEY

SEQ ID NO: 2221 - protein, 20 aa, Homo sapiens
ELEDIKVSLQRSVSTQKALE

SEQ ID NO: 2222 - protein, 20 aa, Homo sapiens
SILQEQISHLQFVIHSQHQN

SEQ ID NO: 2223 - protein, 20 aa, Homo sapiens
EKQPYYEEQARLSKIHLEKY

SEQ ID NO: 2224 - protein, 20 aa, Homo sapiens
RALRKDKPAATAASFTAEEW

SEQ ID NO: 2225 - protein, 20 aa, Homo sapiens
GVDGQWDLSNYHLLDLGRPH

SEQ ID NO: 2226 - protein, 20 aa, Homo sapiens
PMGPEASFFDVLDRHRESLL

SEQ ID NO: 2227 - protein, 20 aa, Homo sapiens
NEVKRLLRSDAEAVSTRWEV

SEQ ID NO: 2228 - protein, 20 aa, Homo sapiens
QTTFGPVFEDQPLSVLFPEE

SEQ ID NO: 2229 - protein, 20 aa, Homo sapiens
DYGNEEIIPLNRIYHLNRNI

SEQ ID NO: 2230 - protein, 20 aa, Homo sapiens
QTQLAKTLQEIFQAENTIML

SEQ ID NO: 2231 - protein, 20 aa, Homo sapiens
RITIGTLFSVLHERRSQFPV

SEQ ID NO: 2232 - protein, 20 aa, Homo sapiens
REDNAVSAATALLESEEDTI

SEQ ID NO: 2233 - protein, 20 aa, Homo sapiens
SKPKAPATLLEEWDPVPKPK

SEQ ID NO: 2234 - protein, 20 aa, Homo sapiens
FTKEVNEWMAQDLENIVAIH

SEQ ID NO: 2235 - protein, 20 aa, Homo sapiens
ISMQNLEALLVANRDKEYQS

SEQ ID NO: 2236 - protein, 20 aa, Homo sapiens
VNITEYRASHSTPIEWYPDY

SEQ ID NO: 2237 - protein, 20 aa, Homo sapiens
NFSFRNTLEGFASPLTGIAD

SEQ ID NO: 2238 - protein, 20 aa, Homo sapiens
GTDEAVLQVQAHEHGQEIFQ

SEQ ID NO: 2239 - protein, 20 aa, Homo sapiens
AALLAGRALQGLRRLELASN

SEQ ID NO: 2240 - protein, 20 aa, Homo sapiens
ILSSLELWIDENKIATTGEA

SEQ ID NO: 2241 - protein, 20 aa, Homo sapiens
RDFNQFSSGEKNIFLASFVH

SEQ ID NO: 2242 - protein, 20 aa, Homo sapiens
AREGGRFFPRERKRFRGQER

SEQ ID NO: 2243 - protein, 20 aa, Homo sapiens
GGGQSAKALSVKQLESHRAP

SEQ ID NO: 2244 - protein, 20 aa, Homo sapiens
IQNKPLYFADRLYDSMKGKG

SEQ ID NO: 2245 - protein, 20 aa, Homo sapiens
YLQKVVLKDLWKHSFSWPFQ

SEQ ID NO: 2246 - protein, 20 aa, Homo sapiens
TEKPEFQSQVYNYAKDNNIK

SEQ ID NO: 2247 - protein, 20 aa, Homo sapiens
QMVTDLELSTLLPISHENLT

SEQ ID NO: 2248 - protein, 20 aa, Homo sapiens
PKAKRTSRFLSGIINFIHFR

SEQ ID NO: 2249 - protein, 20 aa, Homo sapiens
KLLEKFSLVQKEYEGYEVES

SEQ ID NO: 2250 - protein, 20 aa, Homo sapiens
RRVVAALPEGMRPDSNLYGF

SEQ ID NO: 2251 - protein, 20 aa, Homo sapiens
EQFTKIKELELMPEKGLKEE

SEQ ID NO: 2252 - protein, 20 aa, Homo sapiens
PQVINAALTLAARPQSKVAQ

SEQ ID NO: 2253 - protein, 20 aa, Homo sapiens
VGSQAHVSFLDPRQPSYNVK

SEQ ID NO: 2254 - protein, 20 aa, Homo sapiens
GERPYWELSNHEVMKAINDG

SEQ ID NO: 2255 - protein, 20 aa, Homo sapiens
LIGQGIIVKDARLNGSVASY

SEQ ID NO: 2256 - protein, 20 aa, Homo sapiens
ELDRLVWRNSIRSSFISSLS

SEQ ID NO: 2257 - protein, 20 aa, Homo sapiens
FLDDPLYGISVSLSSEDQHL

SEQ ID NO: 2258 - protein, 20 aa, Homo sapiens
LDRGANASFEKDKQSILITA

SEQ ID NO: 2259 - protein, 20 aa, Homo sapiens
YRIYDMENVLLGLFSTIHDS

SEQ ID NO: 2260 - protein, 20 aa, Homo sapiens
HRRGSRSYVPLAHSSSAFTI

SEQ ID NO: 2261 - protein, 20 aa, Homo sapiens
MGFEPQIMKILLDVRPDRQT

SEQ ID NO: 2262 - protein, 20 aa, Homo sapiens
KPPLEKILPLLASLQRIRVR

SEQ ID NO: 2263 - protein, 20 aa, Homo sapiens
DAKVRMVIITGPPEAQFKAQ

SEQ ID NO: 2264 - protein, 20 aa, Homo sapiens
RAKLQELNAIPPILDLLKSE

SEQ ID NO: 2265 - protein, 20 aa, Homo sapiens
MIEEPRLYEKNKPFYKLQEV

SEQ ID NO: 2266 - protein, 20 aa, Homo sapiens
FPTVRPADLTRVIMPLEQRS

SEQ ID NO: 2267 - protein, 20 aa, Homo sapiens
REKRRKAREETQGLKVAHAT

SEQ ID NO: 2268 - protein, 20 aa, Homo sapiens
WGPRAYAETSKMKVLEFLAK

SEQ ID NO: 2269 - protein, 20 aa, Homo sapiens
ATEEKIWEFLNKMRIYDGKK

SEQ ID NO: 2270 - protein, 20 aa, Homo sapiens
STSTERSLKDSLTRKTKMLV

SEQ ID NO: 2271 - protein, 20 aa, Homo sapiens
EVIKRKVVEFLAMLKNTVPI

SEQ ID NO: 2272 - protein, 20 aa, Homo sapiens
RKLQSIIYDSNTRGIHNEIS

SEQ ID NO: 2273 - protein, 20 aa, Homo sapiens
LDVQIQHVVEGKRALSELTQ

SEQ ID NO: 2274 - protein, 20 aa, Homo sapiens
RTGYTKTYQAHAKQKFSRLW

SEQ ID NO: 2275 - protein, 20 aa, Homo sapiens
KYFEDSRNMKTLKDPYLKGE

SEQ ID NO: 2276 - protein, 20 aa, Homo sapiens
AFEPAIEMQKSVPNKALELK

SEQ ID NO: 2277 - protein, 20 aa, Homo sapiens
GLNVKRIIQELQKLMNKQHS

SEQ ID NO: 2278 - protein, 20 aa, Homo sapiens
ANVFGDGPYSTFLTSSPIRS

SEQ ID NO: 2279 - protein, 20 aa, Homo sapiens
KLNWIPSFPTYDYFNQVTLQ

SEQ ID NO: 2280 - protein, 20 aa, Homo sapiens
LPRNMPSHRAQIMARYPEGY

SEQ ID NO: 2281 - protein, 20 aa, Homo sapiens
HAFDGTILFLPKRLQQKVTE

SEQ ID NO: 2282 - protein, 20 aa, Homo sapiens
IEGRVLPMERINLKNTSFIT

SEQ ID NO: 2283 - protein, 20 aa, Homo sapiens
KDYSIVKELAKHTRLSPRRR

SEQ ID NO: 2284 - protein, 20 aa, Homo sapiens
ILKKLSMYQIGRNFYNPSEP

SEQ ID NO: 2285 - protein, 20 aa, Homo sapiens
PLQALLERASATLQDLVFDE

SEQ ID NO: 2286 - protein, 20 aa, Homo sapiens
DSVELAHYDVLLSYPNKTHP

SEQ ID NO: 2287 - protein, 20 aa, Homo sapiens
DERIAAHQALQHPYFQEQRK

SEQ ID NO: 2288 - protein, 20 aa, Homo sapiens
QPQPDNILSTASTGLINVAG

SEQ ID NO: 2289 - protein, 20 aa, Homo sapiens
EYENESQASQAVMKMDGMTI

SEQ ID NO: 2290 - protein, 20 aa, Homo sapiens
PSSLTTPGSTLKFGAIRKMR

SEQ ID NO: 2291 - protein, 20 aa, Homo sapiens
EKLEEKHSQITELENLVQRM

SEQ ID NO: 2292 - protein, 20 aa, Homo sapiens
KDERRKILQAFPDMHNSNIS

SEQ ID NO: 2293 - protein, 20 aa, Homo sapiens
ETLEQYGKAYVDYKTVLQID

SEQ ID NO: 2294 - protein, 20 aa, Homo sapiens
REAELKKEYNALHQRHTEMI

SEQ ID NO: 2295 - protein, 20 aa, Homo sapiens
IYYTDSQLFGNQTVVDNIIN

SEQ ID NO: 2296 - protein, 20 aa, Homo sapiens
DGTKEIESQGSIPGFLISSG

SEQ ID NO: 2297 - protein, 20 aa, Homo sapiens
DIGDTTIQLSWSRGFDNHSP

SEQ ID NO: 2298 - protein, 20 aa, Homo sapiens
VDVADKLVTFGLAKNITPQR

SEQ ID NO: 2299 - protein, 20 aa, Homo sapiens
LYHREKRIGIDLVHDNVEKN

SEQ ID NO: 2300 - protein, 20 aa, Homo sapiens
SVSTPLSPGSVSSAASQYKD

SEQ ID NO: 2301 - protein, 20 aa, Homo sapiens
HSNLLYSQYFTYFAGEPQAN

SEQ ID NO: 2302 - protein, 20 aa, Homo sapiens
YVTERIIAMSFPSSGRQSFY

SEQ ID NO: 2303 - protein, 20 aa, Homo sapiens
LAMKEKTISGMKNIIAEMEQ

SEQ ID NO: 2304 - protein, 20 aa, Homo sapiens
EAYRRRHHNSSLNFFNWFSD

SEQ ID NO: 2305 - protein, 20 aa, Homo sapiens
ASQSSMHNALHIYMNGTMSQ

SEQ ID NO: 2306 - protein, 20 aa, Homo sapiens
PGPALNVKLQPVETKAHFDS

SEQ ID NO: 2307 - protein, 20 aa, Homo sapiens
VSLTYVSFRNLTHLESLHLE

SEQ ID NO: 2308 - protein, 20 aa, Homo sapiens
QSVEPQQDFAKYIEMHVIVE

SEQ ID NO: 2309 - protein, 20 aa, Homo sapiens
TKVNFTEIQKLVLDVAHVHE

SEQ ID NO: 2310 - protein, 20 aa, Homo sapiens
KGTGSAEAVLQNAYQAIHNE

SEQ ID NO: 2311 - protein, 20 aa, Homo sapiens
GMKQANGQFIDKLVESVMKL

SEQ ID NO: 2312 - protein, 20 aa, Homo sapiens
KSYSPYDMLESIRKEVKGDL

SEQ ID NO: 2313 - protein, 20 aa, Homo sapiens
AQALEKLFMQKLSQMPQEEQ

SEQ ID NO: 2314 - protein, 20 aa, Homo sapiens
QLKKELEKATASALDLLKRE

SEQ ID NO: 2315 - protein, 20 aa, Homo sapiens
VGQLQAREQALTTMIKLKDK

SEQ ID NO: 2316 - protein, 20 aa, Homo sapiens
IQESLKTKIVDSPEKLKNYK

SEQ ID NO: 2317 - protein, 20 aa, Homo sapiens
KSLKSQVAEAKMTFKRFQAN

SEQ ID NO: 2318 - protein, 20 aa, Homo sapiens
ISHEKKAHDNWLAARNAERN

SEQ ID NO: 2319 - protein, 20 aa, Homo sapiens
SPQEMEVLQFHALEENVMVA

SEQ ID NO: 2320 - protein, 20 aa, Homo sapiens
TGIGELAAALNEFDNKIILD

SEQ ID NO: 2321 - protein, 20 aa, Homo sapiens
VGTGQGSLLFYDIRAQRFLE

SEQ ID NO: 2322 - protein, 20 aa, Homo sapiens
RLEGVISKYKPMMIITEYME

SEQ ID NO: 2323 - protein, 20 aa, Homo sapiens
NNRLKSLSIQYLELDRLVWR

SEQ ID NO: 2324 - protein, 20 aa, Homo sapiens
EASKGYYLTKALTGHNMSEA

SEQ ID NO: 2325 - protein, 20 aa, Homo sapiens
VSLVQELLDSGISVDSNFQY

SEQ ID NO: 2326 - protein, 20 aa, Homo sapiens
TLSSRRRELIQKLKSFISFY

SEQ ID NO: 2327 - protein, 20 aa, Homo sapiens
GVSRQLRTKAWNRQLYPEWT

SEQ ID NO: 2328 - protein, 20 aa, Homo sapiens
PPIKKNFYKESTATSAMSKV

SEQ ID NO: 2329 - protein, 20 aa, Homo sapiens
WEEFADPFAFIHKIRPIAEQ

SEQ ID NO: 2330 - protein, 20 aa, Homo sapiens
GKTVNELQNLSSAEVVVPRD

SEQ ID NO: 2331 - protein, 20 aa, Homo sapiens
YSQTGYLSSSNIINDGFYDY

SEQ ID NO: 2332 - protein, 20 aa, Homo sapiens
LSVHIKNLLKHGASLDNFHF

SEQ ID NO: 2333 - protein, 20 aa, Homo sapiens
AQALQAEEQEAAFFSSTLNV

SEQ ID NO: 2334 - protein, 20 aa, Homo sapiens
LKGNSATEEEIWKFMNVLGA

SEQ ID NO: 2335 - protein, 20 aa, Homo sapiens
LITKDLVQEKYLEYKQVPSS

SEQ ID NO: 2336 - protein, 20 aa, Homo sapiens
FPEILKKASFNMEVVFGVDL

SEQ ID NO: 2337 - protein, 20 aa, Homo sapiens
DPPRYQFLWGPRAHAETSKM

SEQ ID NO: 2338 - protein, 20 aa, Homo sapiens
DELARFLLLKYQVKQPITKA

SEQ ID NO: 2339 - protein, 20 aa, Homo sapiens
PEEASDIIYFGRSKKRLSTL

SEQ ID NO: 2340 - protein, 20 aa, Homo sapiens
DSDDTLYGSLTNSLNISEFE

SEQ ID NO: 2341 - protein, 20 aa, Homo sapiens
MEKRPVQVLLSSLLRKKMLP

SEQ ID NO: 2342 - protein, 20 aa, Homo sapiens
KWHSEDEIRITTWRNRKPPE

SEQ ID NO: 2343 - protein, 20 aa, Homo sapiens
QIVEFLLIKNANANAVNKYK

SEQ ID NO: 2344 - protein, 20 aa, Homo sapiens
TEKFDLSNLQNNYAHLTNSS

SEQ ID NO: 2345 - protein, 20 aa, Homo sapiens
VAEALSTLESWRSRYNQVVK

SEQ ID NO: 2346 - protein, 20 aa, Homo sapiens
RLWQELSDSLGPVVQVNTWS

SEQ ID NO: 2347 - protein, 20 aa, Homo sapiens
PKTMVNISDQTMHSIPTSPS

SEQ ID NO: 2348 - protein, 20 aa, Homo sapiens
YHDMTAGRRSIAGFVASINE

SEQ ID NO: 2349 - protein, 20 aa, Homo sapiens
KTPKDSFTMSDGKEITFLEY

SEQ ID NO: 2350 - protein, 20 aa, Homo sapiens
LLQLWDLKFDTNFLSVPGRV

SEQ ID NO: 2351 - protein, 20 aa, Homo sapiens
ETQRGETIKMTITLKRELPS

SEQ ID NO: 2352 - protein, 20 aa, Homo sapiens
MLTDVSPEPLQALLERASAT

SEQ ID NO: 2353 - protein, 20 aa, Homo sapiens
TLRGAVEPDRYVILGGHRDS

SEQ ID NO: 2354 - protein, 20 aa, Homo sapiens
LQSVLGSGTNGRVPVLRPLK

SEQ ID NO: 2355 - protein, 20 aa, Homo sapiens
RSTRDLYATVIHDIQEEEME

SEQ ID NO: 2356 - protein, 20 aa, Homo sapiens
DGMTIKENIIKVAISNPPQR

SEQ ID NO: 2357 - protein, 20 aa, Homo sapiens
DSSETTDLLSMVSEEETLKT

SEQ ID NO: 2358 - protein, 20 aa, Homo sapiens
KLSLENKLLQLKSSATYGKS

SEQ ID NO: 2359 - protein, 20 aa, Homo sapiens
NEKERTRFENLGPQLTGKSN

SEQ ID NO: 2360 - protein, 20 aa, Homo sapiens
PASVPLQAWHPAKEMISKQA

SEQ ID NO: 2361 - protein, 20 aa, Homo sapiens
SIRLDSTLRLYHAHTYQHLQ

SEQ ID NO: 2362 - protein, 20 aa, Homo sapiens
KGVPDLNTRLLVKKLWDTFH

SEQ ID NO: 2363 - protein, 20 aa, Homo sapiens
PDVKEMEKSSFTEYIESPDV

SEQ ID NO: 2364 - protein, 20 aa, Homo sapiens
VFSKFAQLNLAAEDTRLFAP

SEQ ID NO: 2365 - protein, 20 aa, Homo sapiens
ESVLVGYVDYGNFEILSLMR

SEQ ID NO: 2366 - protein, 20 aa, Homo sapiens
IDDTLQTLKLRLRETQDTLQ

SEQ ID NO: 2367 - protein, 20 aa, Homo sapiens
PEHSEAFQASSDTLVAVEKS

SEQ ID NO: 2368 - protein, 20 aa, Homo sapiens
NPETDVSLVPDASVLSKPIF

SEQ ID NO: 2369 - protein, 20 aa, Homo sapiens
ILADLIFTDSKLYIPLEYRS

SEQ ID NO: 2370 - protein, 20 aa, Homo sapiens
VANRDKEYQSQIALQEKESE

SEQ ID NO: 2371 - protein, 20 aa, Homo sapiens
SANDPIFLLHHAFVDSIFEQ

SEQ ID NO: 2372 - protein, 20 aa, Homo sapiens
NRNLTEVPTDLPAYVRNLFL

SEQ ID NO: 2373 - protein, 20 aa, Homo sapiens
LVLRPHDVAFLLVYREKSNY

SEQ ID NO: 2374 - protein, 20 aa, Homo sapiens
FQKLGEYYLQNAFLVAYTKK

SEQ ID NO: 2375 - protein, 20 aa, Homo sapiens
SDSWAEDLIVSALLLIQYHL

SEQ ID NO: 2376 - protein, 20 aa, Homo sapiens
MVYANQVASDMMVSLMKTLK

SEQ ID NO: 2377 - protein, 20 aa, Homo sapiens
RIMVSRSEVDMLKIRSEFKR

SEQ ID NO: 2378 - protein, 20 aa, Homo sapiens
DVFETHFSKIPIEPVESMPL

SEQ ID NO: 2379 - protein, 20 aa, Homo sapiens
QVFIDVINKLKENVEELIED

SEQ ID NO: 2380 - protein, 20 aa, Homo sapiens
IYVKQQSDLQFLNFNVENSQ

SEQ ID NO: 2381 - protein, 20 aa, Homo sapiens
KMKDTVQKLKNARQEVVEKY

SEQ ID NO: 2382 - protein, 20 aa, Homo sapiens
ILHEKKAHDNWSAAWTAERN

SEQ ID NO: 2383 - protein, 20 aa, Homo sapiens
LTETELKFELLEKDPYALDV

SEQ ID NO: 2384 - protein, 20 aa, Homo sapiens
KYASVEASKLKRHVRSHTGE

SEQ ID NO: 2385 - protein, 20 aa, Homo sapiens
SNNEEGVKLVRMAATQIDSL

SEQ ID NO: 2386 - protein, 20 aa, Homo sapiens
RHNVSRVPVYAHITHKALKD

SEQ ID NO: 2387 - protein, 20 aa, Homo sapiens
QSPEDVYFSKSEQLKPLKTY

SEQ ID NO: 2388 - protein, 20 aa, Homo sapiens
QFKKTMSTFHNLVSLNLNYN

SEQ ID NO: 2389 - protein, 20 aa, Homo sapiens
LREIDEKLKMMKENVLESTS

SEQ ID NO: 2390 - protein, 20 aa, Homo sapiens
LITAVQNVITELPVNSQKIT

SEQ ID NO: 2391 - protein, 20 aa, Homo sapiens
IHDSIQYVQKNAGKLTTTIG

SEQ ID NO: 2392 - protein, 20 aa, Homo sapiens
SGYLAEADLSYTWDFGDSSG

SEQ ID NO: 2393 - protein, 20 aa, Homo sapiens
DLASRGLDVHDVTHVYNFDF

SEQ ID NO: 2394 - protein, 20 aa, Homo sapiens
DQIAKYWELQGSTLKIPHVE

SEQ ID NO: 2395 - protein, 20 aa, Homo sapiens
LQELTLYNPERTITVKGNVE

SEQ ID NO: 2396 - protein, 20 aa, Homo sapiens
FSWELHISELKFQLKSNVIP

SEQ ID NO: 2397 - protein, 20 aa, Homo sapiens
KNKPFYKLQEVKILAQFYND

SEQ ID NO: 2398 - protein, 20 aa, Homo sapiens
SSVRARRRTTATTFRARSRA

SEQ ID NO: 2399 - protein, 20 aa, Homo sapiens
TTAAAAAAGVSSTKSKKGAK

SEQ ID NO: 2400 - protein, 20 aa, Homo sapiens
GRSRSALKKPQRALSTTTSV

SEQ ID NO: 2401 - protein, 20 aa, Homo sapiens
EEERAGARPRVAARRGTTAM

SEQ ID NO: 2402 - protein, 20 aa, Homo sapiens
FPSSTSSSLSQSSPVSSFPS

SEQ ID NO: 2403 - protein, 20 aa, Homo sapiens
VVPMPSWLIRTRESVTDDPQ

SEQ ID NO: 2404 - protein, 20 aa, Homo sapiens
QDVKGYSFIKDLQWIQVSDS

SEQ ID NO: 2405 - protein, 20 aa, Homo sapiens
AAPITEIVSQPERLLFVIDS

SEQ ID NO: 2406 - protein, 20 aa, Homo sapiens
NKLKPGQMEMLKLTMNKRYN

SEQ ID NO: 2407 - protein, 20 aa, Homo sapiens
ASLTPLLLSITKRSEQIVEF

SEQ ID NO: 2408 - protein, 20 aa, Homo sapiens
NNYAHLTNSSINKSGASYEK

SEQ ID NO: 2409 - protein, 20 aa, Homo sapiens
LKRLAEADSEKARLLLLLQD

SEQ ID NO: 2410 - protein, 20 aa, Homo sapiens
LVQQEQHLKEQQRQLREQLQ

SEQ ID NO: 2411 - protein, 20 aa, Homo sapiens
SNSIKRNPNAPVVRRGWLYK

SEQ ID NO: 2412 - protein, 20 aa, Homo sapiens
MEARRLRSALLFQHEDLIGK

SEQ ID NO: 2413 - protein, 20 aa, Homo sapiens
TIGQPTRLRSVAQKILLQIN

SEQ ID NO: 2414 - protein, 20 aa, Homo sapiens
VGQSIHQEPNRSLSTRLFYL

SEQ ID NO: 2415 - protein, 20 aa, Homo sapiens
GLTDQATSDFQLMKAVAEKT

SEQ ID NO: 2416 - protein, 20 aa, Homo sapiens
NSHQDFWTVWSGNRASLYSF

SEQ ID NO: 2417 - protein, 20 aa, Homo sapiens
SDIVPPFSAFSPQGMPEGDL

SEQ ID NO: 2418 - protein, 20 aa, Homo sapiens
LMKEVRRFGQNYERIFILLE

SEQ ID NO: 2419 - protein, 20 aa, Homo sapiens
FIQATDYVEIWQAYLDYLRR

SEQ ID NO: 2420 - protein, 20 aa, Homo sapiens
LSRVYSKLYKEAEKIKKWKV

SEQ ID NO: 2421 - protein, 20 aa, Homo sapiens
ESTSAHIIEETEYVKKIRTT

SEQ ID NO: 2422 - protein, 20 aa, Homo sapiens
TQVKDEAAAQPLNLSSRPKT

SEQ ID NO: 2423 - protein, 20 aa, Homo sapiens
EDYKEKTVIDKSHLSKIETR

SEQ ID NO: 2424 - protein, 20 aa, Homo sapiens
QRHTEMIHNYMEHLERTKLH

SEQ ID NO: 2425 - protein, 20 aa, Homo sapiens
MIYKLVQSNTYATKRDIYYT

SEQ ID NO: 2426 - protein, 20 aa, Homo sapiens
EYLERQLQAEFIESGQYRAN

SEQ ID NO: 2427 - protein, 20 aa, Homo sapiens
QNRVEVLAGDLRFSKLSLED

SEQ ID NO: 2428 - protein, 20 aa, Homo sapiens
MFSDLRSLQLKKTMEIKGTV

SEQ ID NO: 2429 - protein, 20 aa, Homo sapiens
ERRSQFPVLHMEVIVHLLLQ

SEQ ID NO: 2430 - protein, 20 aa, Homo sapiens
ELDHLALEWQITPSFESLSQ

SEQ ID NO: 2431 - protein, 20 aa, Homo sapiens
RLLRLIILLRIFHLFHQKRQ

SEQ ID NO: 2432 - protein, 20 aa, Homo sapiens
LAENKMAIQSRDVAQFRNVV

SEQ ID NO: 2433 - protein, 20 aa, Homo sapiens
RNTLEGFASPLTGIADASQS

SEQ ID NO: 2434 - protein, 20 aa, Homo sapiens
LAQLPSLRHLDLSNNSLVSL

SEQ ID NO: 2435 - protein, 20 aa, Homo sapiens
VIEGKPYTVNLMQKNFLPHN

SEQ ID NO: 2436 - protein, 20 aa, Homo sapiens
YLQNAFLVAYTKKAPQLTSS

SEQ ID NO: 2437 - protein, 20 aa, Homo sapiens
ERPLASSPPRLYEDDETPGA

SEQ ID NO: 2438 - protein, 20 aa, Homo sapiens
LIMAKYSNDGAALAELEEQA

SEQ ID NO: 2439 - protein, 20 aa, Homo sapiens
DTTTPATSAVKASSEFSPTF

SEQ ID NO: 2440 - protein, 20 aa, Homo sapiens
KFHWVEAFDDEMTEKPEFQS

SEQ ID NO: 2441 - protein, 20 aa, Homo sapiens
STIEKQRKELQLLIGELKDR

SEQ ID NO: 2442 - protein, 20 aa, Homo sapiens
SNSGRLSGPAELRSFNMPSL

SEQ ID NO: 2443 - protein, 20 aa, Homo sapiens
ATIIARKSDLRVHMRNLHAY

SEQ ID NO: 2444 - protein, 20 aa, Homo sapiens
FIDASRLVYDGVRDIRKAVL

SEQ ID NO: 2445 - protein, 20 aa, Homo sapiens
YGSEWSVYAVGSQAHVSFLD

SEQ ID NO: 2446 - protein, 20 aa, Homo sapiens
IEKVVQMTNDDIKRIGVRLP

SEQ ID NO: 2447 - protein, 20 aa, Homo sapiens
MYSAELWRYRTITFSGRPSR

SEQ ID NO: 2448 - protein, 20 aa, Homo sapiens
DVERNESLIKSGKKPFSNTE

SEQ ID NO: 2449 - protein, 20 aa, Homo sapiens
FTKNGITSKDQQKILAALKE

SEQ ID NO: 2450 - protein, 20 aa, Homo sapiens
LGSDINVDDMVNELFDSLFP

SEQ ID NO: 2451 - protein, 20 aa, Homo sapiens
ANASFSIALNFPGSQKVLPD

SEQ ID NO: 2452 - protein, 20 aa, Homo sapiens
QKPTPIQSQAWPIVLQGIDL

SEQ ID NO: 2453 - protein, 20 aa, Homo sapiens
VPTELVEKEFWRLVSTIEED

SEQ ID NO: 2454 - protein, 20 aa, Homo sapiens
IDVHRKENAGAAEKSITILS

SEQ ID NO: 2455 - protein, 20 aa, Homo sapiens
EENKTTLLELGAVEPLTKLL

SEQ ID NO: 2456 - protein, 20 aa, Homo sapiens
GLDPAGPRFSRKPPYSRLDY

SEQ ID NO: 2457 - protein, 20 aa, Homo sapiens
FSQGLSSTVQSRTDPLIMKT

SEQ ID NO: 2458 - protein, 20 aa, Homo sapiens
VLRDTASSSLAFGIPQEPQR

SEQ ID NO: 2459 - protein, 20 aa, Homo sapiens
RELLTKVWVQEHYLEYREVP

SEQ ID NO: 2460 - protein, 20 aa, Homo sapiens
KISEDKLKNLRIKLALLLQK

SEQ ID NO: 2461 - protein, 20 aa, Homo sapiens
KMKESDHQIIKRRLRTKTAK

SEQ ID NO: 2462 - protein, 20 aa, Homo sapiens
QSTTSVYSSFVFNLFTPEGA

SEQ ID NO: 2463 - protein, 20 aa, Homo sapiens
NVSQQALDLQNLRFDPDLMG

SEQ ID NO: 2464 - protein, 20 aa, Homo sapiens
NVDVSSTIYNNEVLHQPLSE

SEQ ID NO: 2465 - protein, 20 aa, Homo sapiens
FELFGFDILIDDNLKPWLLE

SEQ ID NO: 2466 - protein, 20 aa, Homo sapiens
EKAQAKTASELSKSMESMRG

SEQ ID NO: 2467 - protein, 20 aa, Homo sapiens
VAFNQQQLVQQEQHLKEQQR

SEQ ID NO: 2468 - protein, 20 aa, Homo sapiens
RSMRDDTMWQLYEWQQRQFY

SEQ ID NO: 2469 - protein, 20 aa, Homo sapiens
ADGSEVSFLEYYRKQYNQEI

SEQ ID NO: 2470 - protein, 20 aa, Homo sapiens
RGPAQRESVGLVSMFRGLGI

SEQ ID NO: 2471 - protein, 20 aa, Homo sapiens
RNEWYDFFIVSQSVQDGTVT

SEQ ID NO: 2472 - protein, 20 aa, Homo sapiens
NPAAFVRAIQQYVDPDVQLV

SEQ ID NO: 2473 - protein, 20 aa, Homo sapiens
SLFFLRGRLDQLLRHVMNPL

SEQ ID NO: 2474 - protein, 20 aa, Homo sapiens
KLGSGNDFEVFFQRLGIASG

SEQ ID NO: 2475 - protein, 20 aa, Homo sapiens
YKPDSNEFAVGTKNYSVSAG

SEQ ID NO: 2476 - protein, 20 aa, Homo sapiens
LQQLEKYKPYEEALLQAEAP

SEQ ID NO: 2477 - protein, 20 aa, Homo sapiens
TPEIYWKLDSKAVPSQTVSR

SEQ ID NO: 2478 - protein, 20 aa, Homo sapiens
VDGKKLRIGEYKQLMRSRRQ

SEQ ID NO: 2479 - protein, 20 aa, Homo sapiens
LPTVVAYNNRAQAEIKLQNW

SEQ ID NO: 2480 - protein, 20 aa, Homo sapiens
LMELQEAVRWTEMIRASREN

SEQ ID NO: 2481 - protein, 20 aa, Homo sapiens
LLPSDLKRLNVPKDSLIPLT

SEQ ID NO: 2482 - protein, 20 aa, Homo sapiens
LATSHMDFSTKSVFSKFAQL

SEQ ID NO: 2483 - protein, 20 aa, Homo sapiens
YPRIISDVLIDEHLVLKSAS

SEQ ID NO: 2484 - protein, 20 aa, Homo sapiens
WNSQEFIQTLSDDFISVRER

SEQ ID NO: 2485 - protein, 20 aa, Homo sapiens
LSRKLDKAVVHLKKAHRRVH

SEQ ID NO: 2486 - protein, 20 aa, Homo sapiens
SVLDNITTDKILIDVFDGLP

SEQ ID NO: 2487 - protein, 20 aa, Homo sapiens
AVQELRRQNYSSNAYHMSST

SEQ ID NO: 2488 - protein, 20 aa, Homo sapiens
SPLTGIADASQSSMHNALHI

SEQ ID NO: 2489 - protein, 20 aa, Homo sapiens
RHLDLSNNSLVSLTYVSFRN

SEQ ID NO: 2490 - protein, 20 aa, Homo sapiens
IEPLESSVGFEHVIYQVKHK

SEQ ID NO: 2491 - protein, 20 aa, Homo sapiens
FQTKAATVTKELRESSLLNQ

SEQ ID NO: 2492 - protein, 20 aa, Homo sapiens
DDKSGDASRLTSAFPDSLYE

SEQ ID NO: 2493 - protein, 20 aa, Homo sapiens
SDMMVSLMKTLKVHSSGKPI

SEQ ID NO: 2494 - protein, 20 aa, Homo sapiens
NYDEKRQLSLNINKLPGDKL

SEQ ID NO: 2495 - protein, 20 aa, Homo sapiens
DQLGNEYFRQPPPRSPPLIH

SEQ ID NO: 2496 - protein, 20 aa, Homo sapiens
QTALQKTQLQLQEMAQKATH

SEQ ID NO: 2497 - protein, 20 aa, Homo sapiens
KSLKSQVAEAKMTFKIFQMN

SEQ ID NO: 2498 - protein, 20 aa, Homo sapiens
KKGRSKKAHVLAASVEQATQ

SEQ ID NO: 2499 - protein, 20 aa, Homo sapiens
SRERGSGIRSVSFYEHIITV

SEQ ID NO: 2500 - protein, 20 aa, Homo sapiens
LVLAGVGFFIHRRRKNQRAR

SEQ ID NO: 2501 - protein, 20 aa, Homo sapiens
KLARQATNLKVNFFFERIMK

SEQ ID NO: 2502 - protein, 20 aa, Homo sapiens
LSAASPTISSFSPRLENRNN

SEQ ID NO: 2503 - protein, 20 aa, Homo sapiens
KFKKAMTIGDVSLVQELLDS

SEQ ID NO: 2504 - protein, 20 aa, Homo sapiens
HQVRSFFQRLQPGLKWVPET

SEQ ID NO: 2505 - protein, 20 aa, Homo sapiens
PSGSWSQKRSFVYVWKTWGQ

SEQ ID NO: 2506 - protein, 20 aa, Homo sapiens
STDKVIVFVSRKAVADHLSS

SEQ ID NO: 2507 - protein, 20 aa, Homo sapiens
DMRRLIDLGVGLAPYSAVEK

SEQ ID NO: 2508 - protein, 20 aa, Homo sapiens
AIIGKQGQHIKQLSRFAGAS

SEQ ID NO: 2509 - protein, 20 aa, Homo sapiens
ILETKELNDLHIEALAVIAN

SEQ ID NO: 2510 - protein, 20 aa, Homo sapiens
AEPLFEQNNSLNVNFNTQKK

SEQ ID NO: 2511 - protein, 20 aa, Homo sapiens
DLVKLKYLEYRQVPNSNPAR

SEQ ID NO: 2512 - protein, 20 aa, Homo sapiens
NMLGIYDGKRHLIFGEPRKL

SEQ ID NO: 2513 - protein, 20 aa, Homo sapiens
PGSPSFSSTLLSLFQSSPER

SEQ ID NO: 2514 - protein, 20 aa, Homo sapiens
RLSTLKFIGQYGNGLKSGSM

SEQ ID NO: 2515 - protein, 20 aa, Homo sapiens
KSSGQMAQKFSFSKVFGPAT

SEQ ID NO: 2516 - protein, 20 aa, Homo sapiens
KQKFSRLWSSKSVTEIHLYF

SEQ ID NO: 2517 - protein, 20 aa, Homo sapiens
NEWNYTRAGQAFTMLQTEGK

SEQ ID NO: 2518 - protein, 20 aa, Homo sapiens
KEILEAEIESHHPRLASAVQ

SEQ ID NO: 2519 - protein, 20 aa, Homo sapiens
LMAEDEPSGALLKPLVFRVD

SEQ ID NO: 2520 - protein, 20 aa, Homo sapiens
DEMNKEIEAARRQFQSQLAD

SEQ ID NO: 2521 - protein, 20 aa, Homo sapiens
DSVDLGAAGASAQPLQPSSP

SEQ ID NO: 2522 - protein, 20 aa, Homo sapiens
RRGWLYKQDSTGMKLWKKRW

SEQ ID NO: 2523 - protein, 20 aa, Homo sapiens
WYDFFIVSQAVRSGSVSPTH

SEQ ID NO: 2524 - protein, 20 aa, Homo sapiens
LLPELSFMTGIPEKMKKDFR

SEQ ID NO: 2525 - protein, 20 aa, Homo sapiens
ALLDHEAKKMSTYLKTISPN

SEQ ID NO: 2526 - protein, 20 aa, Homo sapiens
VAESSSNTSSRLSVIVVRKK

SEQ ID NO: 2527 - protein, 20 aa, Homo sapiens
LAKFSPYLGQMINLRRLLLS

SEQ ID NO: 2528 - protein, 20 aa, Homo sapiens
NDQLMFLERAFIDPLGLPDR

SEQ ID NO: 2529 - protein, 20 aa, Homo sapiens
MPAMSTRDQHATIIHNLREE

SEQ ID NO: 2530 - protein, 20 aa, Homo sapiens
EEDEVKAARTRRKVLSRAVA

SEQ ID NO: 2531 - protein, 20 aa, Homo sapiens
RVQAENSRLEMHFKLKEDYE

SEQ ID NO: 2532 - protein, 20 aa, Homo sapiens
QQPHGVDGKLSSINNMGLNS

SEQ ID NO: 2533 - protein, 20 aa, Homo sapiens
GTTKTFKIPIEHLDFKYIEK

SEQ ID NO: 2534 - protein, 20 aa, Homo sapiens
EQKREQYRQVKAHVQKEDGR

SEQ ID NO: 2535 - protein, 20 aa, Homo sapiens
ARNEAPAFTIDNRSSWENIK

SEQ ID NO: 2536 - protein, 20 aa, Homo sapiens
EPVQQDMNGILLGYEIRYWK

SEQ ID NO: 2537 - protein, 20 aa, Homo sapiens
LQKQVEKHEHILLFLLNNST

SEQ ID NO: 2538 - protein, 20 aa, Homo sapiens
LEAQLHEYVKQGNYVKVKKI

SEQ ID NO: 2539 - protein, 20 aa, Homo sapiens
LVELQMMMETIQFIENKKRH

SEQ ID NO: 2540 - protein, 20 aa, Homo sapiens
AARVSPISESVLARLSKFEV

SEQ ID NO: 2541 - protein, 20 aa, Homo sapiens
EIQGNVKVLKSERDKIFLLY

SEQ ID NO: 2542 - protein, 20 aa, Homo sapiens
FLLVYREKSNYVGATFQGKM

SEQ ID NO: 2543 - protein, 20 aa, Homo sapiens
EKNIFLASFVHEYSRRHPQL

SEQ ID NO: 2544 - protein, 20 aa, Homo sapiens
FRGQERPDDFTASVSEGIMT

SEQ ID NO: 2545 - protein, 20 aa, Homo sapiens
SQKMDMSNIVLMLIQKLLNE

SEQ ID NO: 2546 - protein, 20 aa, Homo sapiens
RRRREAMVGTIDMTLQSDIM

SEQ ID NO: 2547 - protein, 20 aa, Homo sapiens
LEKRVKELQMKITKQQVFID

SEQ ID NO: 2548 - protein, 20 aa, Homo sapiens
LHDELLFTVEREKRKDELLN

SEQ ID NO: 2549 - protein, 20 aa, Homo sapiens
SENGAYLDNPPKGALKKLIH

SEQ ID NO: 2550 - protein, 20 aa, Homo sapiens
LANRFKEFGKEMVKLNYVAA

SEQ ID NO: 2551 - protein, 20 aa, Homo sapiens
NKNKELGAVSLDGYFHLWKA

SEQ ID NO: 2552 - protein, 20 aa, Homo sapiens
EKDGEFSVLQLVGMLRGIAA

SEQ ID NO: 2553 - protein, 20 aa, Homo sapiens
ALRVFKARIYTNRYETNEED

SEQ ID NO: 2554 - protein, 20 aa, Homo sapiens
KELDSQLQDAIQKMKKLDKI

SEQ ID NO: 2555 - protein, 20 aa, Homo sapiens
QLLQSASMELKFLIIQNAAV

SEQ ID NO: 2556 - protein, 20 aa, Homo sapiens
LADTNSLAVVSTQLIMPGQE

SEQ ID NO: 2557 - protein, 20 aa, Homo sapiens
PSLKGQRNRPGMLVLTPTRE

SEQ ID NO: 2558 - protein, 20 aa, Homo sapiens
LTESKETASAMATLGEARLR

SEQ ID NO: 2559 - protein, 20 aa, Homo sapiens
RIRKLQIRNIPPHLQWEVLD

SEQ ID NO: 2560 - protein, 20 aa, Homo sapiens
DLRAVLLINSKSYVSPPSSM

SEQ ID NO: 2561 - protein, 20 aa, Homo sapiens
KNLLKHGASLDNFHFIGVSL

SEQ ID NO: 2562 - protein, 20 aa, Homo sapiens
ALSTTTSVDVSYKKSYKGAN

SEQ ID NO: 2563 - protein, 20 aa, Homo sapiens
VAARRGTTAMTSAYSRATSS

SEQ ID NO: 2564 - protein, 20 aa, Homo sapiens
DVQSPLQNPASSFFSSALLS

SEQ ID NO: 2565 - protein, 20 aa, Homo sapiens
EVKKAEEAVKIAESILKEAQ

SEQ ID NO: 2566 - protein, 20 aa, Homo sapiens
YLAYDETLNVLKFSAIAQKV

SEQ ID NO: 2567 - protein, 20 aa, Homo sapiens
GLRKTDFDEETQALLTAEEE

SEQ ID NO: 2568 - protein, 20 aa, Homo sapiens
SLSALPKTQHDLSSILVDVW

SEQ ID NO: 2569 - protein, 20 aa, Homo sapiens
VPNKAFELKNEQTLRADPMF

SEQ ID NO: 2570 - protein, 20 aa, Homo sapiens
DETTPAVVQSVLLERGWNKF

SEQ ID NO: 2571 - protein, 20 aa, Homo sapiens
TVTKSHKRGMKGDTVNVRRS

SEQ ID NO: 2572 - protein, 20 aa, Homo sapiens
GASAQPLQPSSPVAYDIISQ

SEQ ID NO: 2573 - protein, 20 aa, Homo sapiens
YTLEQALLSASQEIEMHADN

SEQ ID NO: 2574 - protein, 20 aa, Homo sapiens
KSQGLQISAGFQELSLAERG

SEQ ID NO: 2575 - protein, 20 aa, Homo sapiens
NFYDPTSAMVLQQHRLQIWP

SEQ ID NO: 2576 - protein, 20 aa, Homo sapiens
NKLIGSIVLTKYNNKTYRVD

SEQ ID NO: 2577 - protein, 20 aa, Homo sapiens
ILPSNQKTYYDSIKKYLSSD

SEQ ID NO: 2578 - protein, 20 aa, Homo sapiens
DELFSYLIEKVKRKKNVLRL

SEQ ID NO: 2579 - protein, 20 aa, Homo sapiens
YDVLLSYPNKTHPNYISIIN

SEQ ID NO: 2580 - protein, 20 aa, Homo sapiens
AFINMAATGVSSMSTRDQYA

SEQ ID NO: 2581 - protein, 20 aa, Homo sapiens
YVEFKEEKSALQALEMDRKS

SEQ ID NO: 2582 - protein, 20 aa, Homo sapiens
SEEETLKTLYRNNNPPASHL

SEQ ID NO: 2583 - protein, 20 aa, Homo sapiens
KQIEQLYAAQLASMQVSPGA

SEQ ID NO: 2584 - protein, 20 aa, Homo sapiens
RKDKPAATAASFTAEEWEKI

SEQ ID NO: 2585 - protein, 20 aa, Homo sapiens
ESLFEELSSAGSGLIGDVDE

SEQ ID NO: 2586 - protein, 20 aa, Homo sapiens
IPLTKRDQMKLDSILRRPYV

SEQ ID NO: 2587 - protein, 20 aa, Homo sapiens
SPPATYRWKMNGTEMKLEPG

SEQ ID NO: 2588 - protein, 20 aa, Homo sapiens
RPAKSKKLNKLVENSLSISN

SEQ ID NO: 2589 - protein, 20 aa, Homo sapiens
QLYNWAAPEVILQKAATVKS

SEQ ID NO: 2590 - protein, 20 aa, Homo sapiens
ELQTYHDQLVELLEETKREK

SEQ ID NO: 2591 - protein, 20 aa, Homo sapiens
FHNRVVRIMIDDHNVPTLHQ

SEQ ID NO: 2592 - protein, 20 aa, Homo sapiens
KQKVQDTNLEVNKLKNILKS

SEQ ID NO: 2593 - protein, 20 aa, Homo sapiens
RVSGSSQSPPNLKYKSTLKI

SEQ ID NO: 2594 - protein, 20 aa, Homo sapiens
DEAVGKVARKQLLDWLLANL

SEQ ID NO: 2595 - protein, 20 aa, Homo sapiens
LQLPDYYTIIKNPMDLNTIK

SEQ ID NO: 2596 - protein, 20 aa, Homo sapiens
NVEELIEDKYKIILEKNDTK

SEQ ID NO: 2597 - protein, 20 aa, Homo sapiens
DAPAFNEKASIVLPSQDDFS

SEQ ID NO: 2598 - protein, 20 aa, Homo sapiens
RANRDYVFKQVQEAIAGISN

SEQ ID NO: 2599 - protein, 20 aa, Homo sapiens
WVYRGEAERIFIELKFTVRD

SEQ ID NO: 2600 - protein, 20 aa, Homo sapiens
QRREKEIKKQGLEMRIKLWE

SEQ ID NO: 2601 - protein, 20 aa, Homo sapiens
ELKFLIIQNAAVFQEAFEIV

SEQ ID NO: 2602 - protein, 20 aa, Homo sapiens
EKVPVSEVMGTTLAEMSTPE

SEQ ID NO: 2603 - protein, 20 aa, Homo sapiens
GRTGRAGRTGVSITTLTRND

SEQ ID NO: 2604 - protein, 20 aa, Homo sapiens
NLNNMPVMEQSVLAHITADI

SEQ ID NO: 2605 - protein, 20 aa, Homo sapiens
VNTDSETAVVNVTYSSKDQA

SEQ ID NO: 2606 - protein, 20 aa, Homo sapiens
KIPKEKLPDFSWELHISELK

SEQ ID NO: 2607 - protein, 20 aa, Homo sapiens
ERMEGRPLRTTVFLDTSGTY

SEQ ID NO: 2608 - protein, 20 aa, Homo sapiens
RAGREHFAFGEPRELLTKVW

SEQ ID NO: 2609 - protein, 20 aa, Homo sapiens
PLNSFQYQRRQAMGIPFIIQ

SEQ ID NO: 2610 - protein, 20 aa, Homo sapiens
VSLDSNSNSKILNVKRATIS

SEQ ID NO: 2611 - protein, 20 aa, Homo sapiens
FVKQAVNLLQEANFHIIDNV

SEQ ID NO: 2612 - protein, 20 aa, Homo sapiens
VEMRDVHKDQQLRHTPYSIR

SEQ ID NO: 2613 - protein, 20 aa, Homo sapiens
ELEVKQQLEQALRIQDIELK

SEQ ID NO: 2614 - protein, 20 aa, Homo sapiens
STDVLVKRKLVHDIIDLIYL

SEQ ID NO: 2615 - protein, 20 aa, Homo sapiens
QLADLQQLPDILKITEAKLA

SEQ ID NO: 2616 - protein, 20 aa, Homo sapiens
VAENISSLLGHLPAEIVGKK

SEQ ID NO: 2617 - protein, 20 aa, Homo sapiens
TLRKTKKMMDLRTERPRSAV

SEQ ID NO: 2618 - protein, 20 aa, Homo sapiens
NEYMPSRIIVYRDGVGDGQL

SEQ ID NO: 2619 - protein, 20 aa, Homo sapiens
RTLGRGSSDASLLPLGRAAG

SEQ ID NO: 2620 - protein, 20 aa, Homo sapiens
ERRIGGVFQDLVVNTRQDMK

SEQ ID NO: 2621 - protein, 20 aa, Homo sapiens
QLYQYHVTYIPDLASRRLRI

SEQ ID NO: 2622 - protein, 20 aa, Homo sapiens
SRYISMSVWTSPRRLVELAG

SEQ ID NO: 2623 - protein, 20 aa, Homo sapiens
LQDFDKSNPIVLRMMNDQLM

SEQ ID NO: 2624 - protein, 20 aa, Homo sapiens
GIPSMSTKDLYATVTQNVHE

SEQ ID NO: 2625 - protein, 20 aa, Homo sapiens
NEQRMKAAEKEAALVQQEEE

SEQ ID NO: 2626 - protein, 20 aa, Homo sapiens
KMKDLTFLLEESRDKVNQLE

SEQ ID NO: 2627 - protein, 20 aa, Homo sapiens
SLYSFRNTSTSPHKPDEGSR

SEQ ID NO: 2628 - protein, 20 aa, Homo sapiens
RSGQFAEAAGKYSAAIALLE

SEQ ID NO: 2629 - protein, 20 aa, Homo sapiens
LMPLVVAVLENLDSVFAQDQ

SEQ ID NO: 2630 - protein, 20 aa, Homo sapiens
SSSEVLASIENIIQDIITSL

SEQ ID NO: 2631 - protein, 20 aa, Homo sapiens
FAFGNPVPRIKWRKVDGSLS

SEQ ID NO: 2632 - protein, 20 aa, Homo sapiens
NSGKLLDHVLIEMGYGLKPS

SEQ ID NO: 2633 - protein, 20 aa, Homo sapiens
KAVVSGNYLEADVRLPKPYY

SEQ ID NO: 2634 - protein, 20 aa, Homo sapiens
NIHTSLAIAQKLMELKLGKI

SEQ ID NO: 2635 - protein, 20 aa, Homo sapiens
IYSIPRYVRDLKIQIEMEKK

SEQ ID NO: 2636 - protein, 20 aa, Homo sapiens
RMEQMSNMTLMKETISTVEK

SEQ ID NO: 2637 - protein, 20 aa, Homo sapiens
KDTTIATILLKKVLLKHAKE

SEQ ID NO: 2638 - protein, 20 aa, Homo sapiens
MMAYSDTTMMSDDIDWLRSH

SEQ ID NO: 2639 - protein, 20 aa, Homo sapiens
GLHNYYDVVKNPMDLGTIKE

SEQ ID NO: 2640 - protein, 20 aa, Homo sapiens
KKTLQNLEEVLANTQKHLQE

SEQ ID NO: 2641 - protein, 20 aa, Homo sapiens
ITLSSIFTKDLVEKHNLPWS

SEQ ID NO: 2642 - protein, 20 aa, Homo sapiens
STKYQKVYGTAAVNSPVVSW

SEQ ID NO: 2643 - protein, 20 aa, Homo sapiens
VMWEVMTYGERPYWELSNHE

SEQ ID NO: 2644 - protein, 20 aa, Homo sapiens
EGDQSGWVVPVKGYELAVTQ

SEQ ID NO: 2645 - protein, 20 aa, Homo sapiens
VIYTQLMNPGLPDSALDINE

SEQ ID NO: 2646 - protein, 20 aa, Homo sapiens
PDGQVIWVNNTIINGSQVWG

SEQ ID NO: 2647 - protein, 20 aa, Homo sapiens
PEELVSMAERFKAHQQKREM

SEQ ID NO: 2648 - protein, 20 aa, Homo sapiens
HVERKILDLFQLNKLVAEEG

SEQ ID NO: 2649 - protein, 20 aa, Homo sapiens
PKDVFDPLMIESKKAATVVL

SEQ ID NO: 2650 - protein, 20 aa, Homo sapiens
ATTFIYNRAVKNTRKVAVSL

SEQ ID NO: 2651 - protein, 20 aa, Homo sapiens
SVLQIPVSAASSSTLVSIFQ

SEQ ID NO: 2652 - protein, 20 aa, Homo sapiens
GVNVENRSQAGMFIYSNNRL

SEQ ID NO: 2653 - protein, 20 aa, Homo sapiens
ILQIEDSEMSRVIRVSELSL

SEQ ID NO: 2654 - protein, 20 aa, Homo sapiens
LKKEEFRKFKEHLKQMTLQL

SEQ ID NO: 2655 - protein, 20 aa, Homo sapiens
LSDITEKAPKVKTLNLSKNK

SEQ ID NO: 2656 - protein, 20 aa, Homo sapiens
AFKPAIEMQNSVPNKAFELK

SEQ ID NO: 2657 - protein, 20 aa, Homo sapiens
YNEDDSVVEKAVSVRPEAAP

SEQ ID NO: 2658 - protein, 20 aa, Homo sapiens
HELAETEHENTVLRHNIERM

SEQ ID NO: 2659 - protein, 20 aa, Homo sapiens
DKVNPKSSQRKLNWIPSFPT

SEQ ID NO: 2660 - protein, 20 aa, Homo sapiens
EEETRGVISYQTLPRNMPSH

SEQ ID NO: 2661 - protein, 20 aa, Homo sapiens
IDVEVTRPEWYDFFIVSQAV

SEQ ID NO: 2662 - protein, 20 aa, Homo sapiens
AFDGSILYLPVKLQQVLELK

SEQ ID NO: 2663 - protein, 20 aa, Homo sapiens
GSKITYIDYYRQQHKEIVTV

SEQ ID NO: 2664 - protein, 20 aa, Homo sapiens
LKKKRNDNSEAQLAHLIPEL

SEQ ID NO: 2665 - protein, 20 aa, Homo sapiens
PMQDIKMILKMVQLDSIEDL

SEQ ID NO: 2666 - protein, 20 aa, Homo sapiens
FSTQKVKMHIHSTNEVTRIY

SEQ ID NO: 2667 - protein, 20 aa, Homo sapiens
PPEELHAAAYVFTNDGQQMR

SEQ ID NO: 2668 - protein, 20 aa, Homo sapiens
RQKMSEIFPLTEELWLEWLH

SEQ ID NO: 2669 - protein, 20 aa, Homo sapiens
ESKKKRKMAFEFDINSDSSE

SEQ ID NO: 2670 - protein, 20 aa, Homo sapiens
SKDWKEKMERLNTSELLGEI

SEQ ID NO: 2671 - protein, 20 aa, Homo sapiens
HPFSMKPLLRRAMAYETLEQ

SEQ ID NO: 2672 - protein, 20 aa, Homo sapiens
NEQLITQYEREKALRKHAEE

SEQ ID NO: 2673 - protein, 20 aa, Homo sapiens
AVPSNIQGIRNLVTDAKFVL

SEQ ID NO: 2674 - protein, 20 aa, Homo sapiens
STGILSVRDATKITLAPSSA

SEQ ID NO: 2675 - protein, 20 aa, Homo sapiens
KEILPNGHVKVHFVDYGNIE

SEQ ID NO: 2676 - protein, 20 aa, Homo sapiens
PPPSQELLDDIELLKQQQGS

SEQ ID NO: 2677 - protein, 20 aa, Homo sapiens
ENQIDTAFLSSTSKYEKLEK

SEQ ID NO: 2678 - protein, 20 aa, Homo sapiens
KQKARRIYPSDFAVEILFGE

SEQ ID NO: 2679 - protein, 20 aa, Homo sapiens
QSQIALQEKESEIQLLKEHL

SEQ ID NO: 2680 - protein, 20 aa, Homo sapiens
VFSHGSQKATDIMDAMLRKL

SEQ ID NO: 2681 - protein, 20 aa, Homo sapiens
NSSDDSEDERVKRLAKLQEQ

SEQ ID NO: 2682 - protein, 20 aa, Homo sapiens
NIENYSTNALIQPVDTISIS

SEQ ID NO: 2683 - protein, 20 aa, Homo sapiens
ELNDMVAVHQQQLLSWEEDR

SEQ ID NO: 2684 - protein, 20 aa, Homo sapiens
NEFDNKIILDPMTFSEARFR

SEQ ID NO: 2685 - protein, 20 aa, Homo sapiens
IVSILDKLIRAPDSLKTLAD

SEQ ID NO: 2686 - protein, 20 aa, Homo sapiens
GSRSSNASLEVLSTEPGSFK

SEQ ID NO: 2687 - protein, 20 aa, Homo sapiens
FTDVSLYILGSDINVDDMVN

SEQ ID NO: 2688 - protein, 20 aa, Homo sapiens
RSYVPLAHSSSAFTITDQVP

SEQ ID NO: 2689 - protein, 20 aa, Homo sapiens
LLMEAQLLQVSLPEIQELYQ

SEQ ID NO: 2690 - protein, 20 aa, Homo sapiens
PVIQLLALKTLGVIANDKES

SEQ ID NO: 2691 - protein, 20 aa, Homo sapiens
FSFKLLNQLGMIEEPRLYEK

SEQ ID NO: 2692 - protein, 20 aa, Homo sapiens
QSPPEGENTHSPLQIVPSLP

SEQ ID NO: 2693 - protein, 20 aa, Homo sapiens
EGDLEQTDTYLEALLKEDNL

SEQ ID NO: 2694 - protein, 20 aa, Homo sapiens
NMANSIKFSVWVSFFEIYNE

SEQ ID NO: 2695 - protein, 20 aa, Homo sapiens
HYEEQQAWNITLRIFQKMDR

SEQ ID NO: 2696 - protein, 20 aa, Homo sapiens
LLRRTKRDIVDSLSALPKTQ

SEQ ID NO: 2697 - protein, 20 aa, Homo sapiens
ANILIDSGADINLVDVYGNT

SEQ ID NO: 2698 - protein, 20 aa, Homo sapiens
TDINTLTRQKELLLQKLSTF

SEQ ID NO: 2699 - protein, 20 aa, Homo sapiens
TQLLQQLYTSKAVSDEAVLT

SEQ ID NO: 2700 - protein, 20 aa, Homo sapiens
KQDSTGMKLWKKRWFVLSDL

SEQ ID NO: 2701 - protein, 20 aa, Homo sapiens
LFLPKRLQQKVTEVFSKTRN

SEQ ID NO: 2702 - protein, 20 aa, Homo sapiens
HRPSERQDNHGMLLKGEILL

SEQ ID NO: 2703 - protein, 20 aa, Homo sapiens
PMGITMKPAEMIEVDGDANS

SEQ ID NO: 2704 - protein, 20 aa, Homo sapiens
ASRRLRIALLYSHSELSNKA

SEQ ID NO: 2705 - protein, 20 aa, Homo sapiens
RLSEGDVMHLSQSPSVSQLS

SEQ ID NO: 2706 - protein, 20 aa, Homo sapiens
SGKIVIARYGKVFRGNKVKN

SEQ ID NO: 2707 - protein, 20 aa, Homo sapiens
RHSSSKRRKSMSSWLDKQED

SEQ ID NO: 2708 - protein, 20 aa, Homo sapiens
YVEIWQAYLDYLRRRVDFKQ

SEQ ID NO: 2709 - protein, 20 aa, Homo sapiens
AVPSQTVSRNFTSVDHGISK

SEQ ID NO: 2710 - protein, 20 aa, Homo sapiens
IGGSLGRGSSLDILSSLNSP

SEQ ID NO: 2711 - protein, 20 aa, Homo sapiens
NWREKLSPIPAVPASVPLQA

SEQ ID NO: 2712 - protein, 20 aa, Homo sapiens
AATSPSTNGASPVMDKPPEM

SEQ ID NO: 2713 - protein, 20 aa, Homo sapiens
RKEMEIMADSKMKAEIQALT

SEQ ID NO: 2714 - protein, 20 aa, Homo sapiens
LVSSSAWSSALGSQTTFGPV

SEQ ID NO: 2715 - protein, 20 aa, Homo sapiens
YGNIEEVTADELRMISSTFL

SEQ ID NO: 2716 - protein, 20 aa, Homo sapiens
RVQRYGLHPDVNVYLGLTSE

SEQ ID NO: 2717 - protein, 20 aa, Homo sapiens
DSQSDLTLHSEIAYISKPGI

SEQ ID NO: 2718 - protein, 20 aa, Homo sapiens
GVKTPSQKRYVAYFAQVKHL

SEQ ID NO: 2719 - protein, 20 aa, Homo sapiens
VSALLLIQYHLAQGGRRDAR

SEQ ID NO: 2720 - protein, 20 aa, Homo sapiens
KPGDDIVLMAQALEKLFMQK

SEQ ID NO: 2721 - protein, 20 aa, Homo sapiens
EERNKHLEDLIRKPREKARK

SEQ ID NO: 2722 - protein, 20 aa, Homo sapiens
NHPKVDIKREKNQKSLFKDQ

SEQ ID NO: 2723 - protein, 20 aa, Homo sapiens
DGVRDIRKAVLMIRTPEELE

SEQ ID NO: 2724 - protein, 20 aa, Homo sapiens
KEVPVAIKTLKAGYTEKQRV

SEQ ID NO: 2725 - protein, 20 aa, Homo sapiens
VVMVDREKKRLVELLKDLDE

SEQ ID NO: 2726 - protein, 20 aa, Homo sapiens
YQLTARLNMEQLLQSASMEL

SEQ ID NO: 2727 - protein, 20 aa, Homo sapiens
PSAAELQDLLDVSFEFDVEL

SEQ ID NO: 2728 - protein, 20 aa, Homo sapiens
LVRGEYGRAWNEVMLQNDSR

SEQ ID NO: 2729 - protein, 20 aa, Homo sapiens
SLTDSESLIESEPLFTYTLD

SEQ ID NO: 2730 - protein, 20 aa, Homo sapiens
MKRSSSLPSWKSLLNVPMED

SEQ ID NO: 2731 - protein, 20 aa, Homo sapiens
LKLGIKHQSVAFTKLNNASS

SEQ ID NO: 2732 - protein, 20 aa, Homo sapiens
DLRRNGVVDADIPALLGTKI

SEQ ID NO: 2733 - protein, 20 aa, Homo sapiens
PPEKPSAFEPAIEMQKSVPN

SEQ ID NO: 2734 - protein, 20 aa, Homo sapiens
EQLHVQLADKDLYVAEALST

SEQ ID NO: 2735 - protein, 20 aa, Homo sapiens
VEQYGPQENVHMFVDSDSTY

SEQ ID NO: 2736 - protein, 20 aa, Homo sapiens
DRPLTKINSVKLNSLPSEYE

SEQ ID NO: 2737 - protein, 20 aa, Homo sapiens
GVGDGQLKTLVNYEVPQFLD

SEQ ID NO: 2738 - protein, 20 aa, Homo sapiens
SINLTLTKWYSRVVFQMPHQ

SEQ ID NO: 2739 - protein, 20 aa, Homo sapiens
LAFIVVKKRINTRFFLKHGS

SEQ ID NO: 2740 - protein, 20 aa, Homo sapiens
ASSSNGFLGTSRISTNDKYG

SEQ ID NO: 2741 - protein, 20 aa, Homo sapiens
SLSGVMLTDVSPEPLQALLE

SEQ ID NO: 2742 - protein, 20 aa, Homo sapiens
MPEGDLVYVNYARTEDFFKL

SEQ ID NO: 2743 - protein, 20 aa, Homo sapiens
TNDGQQMRSDEVNLVATGHQ

SEQ ID NO: 2744 - protein, 20 aa, Homo sapiens
AHGTVKDLRLVTNRAGKPKG

SEQ ID NO: 2745 - protein, 20 aa, Homo sapiens
ESNKARAAHSFVVTEFETTV

SEQ ID NO: 2746 - protein, 20 aa, Homo sapiens
LNSPALFGDQDTVMKAIQEA

SEQ ID NO: 2747 - protein, 20 aa, Homo sapiens
LAITAPKDLPMFLSNKLEGD

SEQ ID NO: 2748 - protein, 20 aa, Homo sapiens
MSERVSGLAGSIYREFERLI

SEQ ID NO: 2749 - protein, 20 aa, Homo sapiens
SGPSSKIRTREAAPSVAPSG

SEQ ID NO: 2750 - protein, 20 aa, Homo sapiens
EIIPLNRIYHLNRNIDLFPP

SEQ ID NO: 2751 - protein, 20 aa, Homo sapiens
DIPWKGLDGSVVKKAVVSGN

SEQ ID NO: 2752 - protein, 20 aa, Homo sapiens
TPKKVEMQRSLPGSLLPLEN

SEQ ID NO: 2753 - protein, 20 aa, Homo sapiens
HLFHQKRQLEKLIRRRVSEN

SEQ ID NO: 2754 - protein, 20 aa, Homo sapiens
SFYANRLTNLVIAMARKEIN

SEQ ID NO: 2755 - protein, 20 aa, Homo sapiens
SVFPKTSISPLNVVQGASVN

SEQ ID NO: 2756 - protein, 20 aa, Homo sapiens
LSKKEEEVERLQQLKKELEK

SEQ ID NO: 2757 - protein, 20 aa, Homo sapiens
QAFLRHPDVAATRANRDYVF

SEQ ID NO: 2758 - protein, 20 aa, Homo sapiens
LDDLAPDTTYLVQVQALTQE

SEQ ID NO: 2759 - protein, 20 aa, Homo sapiens
LEMRIKLWEEIKSAKYSEAW

SEQ ID NO: 2760 - protein, 20 aa, Homo sapiens
NNYPSLTPQAFEFVGEFFTD

SEQ ID NO: 2761 - protein, 20 aa, Homo sapiens
PDDWDNRTSYLHSPFSTGRS

SEQ ID NO: 2762 - protein, 20 aa, Homo sapiens
ISELKFQLKSNVIPIGHVKK

SEQ ID NO: 2763 - protein, 20 aa, Homo sapiens
ERTQSTFEGFAQSPLQIPVS

SEQ ID NO: 2764 - protein, 20 aa, Homo sapiens
LPSIPLGTMSTISPSKNEKE

SEQ ID NO: 2765 - protein, 20 aa, Homo sapiens
NASSRSHSIFTVKILQIEDS

SEQ ID NO: 2766 - protein, 20 aa, Homo sapiens
FFKDPKRAMEAFNLVRESEQ

SEQ ID NO: 2767 - protein, 20 aa, Homo sapiens
VIEVHNKASLTPLLLSITKR

SEQ ID NO: 2768 - protein, 20 aa, Homo sapiens
APMEDKLNQAHLEVQQLKAS

SEQ ID NO: 2769 - protein, 20 aa, Homo sapiens
LELMMDHLQKQPNTLRHVVI

SEQ ID NO: 2770 - protein, 20 aa, Homo sapiens
PAQTVHYRPINLSSSENKIV

SEQ ID NO: 2771 - protein, 20 aa, Homo sapiens
FRLTSRPQWALYQYHIDYNP

SEQ ID NO: 2772 - protein, 20 aa, Homo sapiens
LVSMFRGLGIETVSKTPLKR

SEQ ID NO: 2773 - protein, 20 aa, Homo sapiens
LLNAMPLHSWLILYSRSSHR

SEQ ID NO: 2774 - protein, 20 aa, Homo sapiens
EKQLIGLIVLTRYNNRTYSI

SEQ ID NO: 2775 - protein, 20 aa, Homo sapiens
KYAGESFPGIYDALFDIESK

SEQ ID NO: 2776 - protein, 20 aa, Homo sapiens
INDDIKYQLMKEVRRFGQNY

SEQ ID NO: 2777 - protein, 20 aa, Homo sapiens
HVDLIRLLRLEGELTKVRMA

SEQ ID NO: 2778 - protein, 20 aa, Homo sapiens
GSTLKFGAIRKMREDRWAVI

SEQ ID NO: 2779 - protein, 20 aa, Homo sapiens
GATVAEARVYRDARGRASSE

SEQ ID NO: 2780 - protein, 20 aa, Homo sapiens
GLQLANDSVNRLSRILMELD

SEQ ID NO: 2781 - protein, 20 aa, Homo sapiens
ILENTQLLETKNALNIVKND

SEQ ID NO: 2782 - protein, 20 aa, Homo sapiens
EYQNGDGFGYLLSFRRQGST

SEQ ID NO: 2783 - protein, 20 aa, Homo sapiens
SIKIVDILEEEVVTFAVEVE

SEQ ID NO: 2784 - protein, 20 aa, Homo sapiens
SSTAQENLALETSSPIEEDF

SEQ ID NO: 2785 - protein, 20 aa, Homo sapiens
SYGENIVELSSSDSSLLLKD

SEQ ID NO: 2786 - protein, 20 aa, Homo sapiens
VFDGLPLYDDVKVQFFYSNL

SEQ ID NO: 2787 - protein, 20 aa, Homo sapiens
AGDGRLRLARLALVLLGWVS

SEQ ID NO: 2788 - protein, 20 aa, Homo sapiens
ELLHTFLRWKTSYLVLRPHD

SEQ ID NO: 2789 - protein, 20 aa, Homo sapiens
NKTLGTFSIAVAHHLGHNLG

SEQ ID NO: 2790 - protein, 20 aa, Homo sapiens
IARRHPFLYAPTILLWAARY

SEQ ID NO: 2791 - protein, 20 aa, Homo sapiens
MAARAVFLALSAQLLQARLM

SEQ ID NO: 2792 - protein, 20 aa, Homo sapiens
MAAGVVFLALSAQLLQARLM

SEQ ID NO: 2793 - protein, 20 aa, Homo sapiens
MAAGAVFLALSAQLLQARLM

SEQ ID NO: 2794 - protein, 20 aa, Homo sapiens
YKDAYKFAADVRLMFMNCYK

SEQ ID NO: 2795 - protein, 20 aa, Homo sapiens
ASQLASKMHSLLALMVGLLT

SEQ ID NO: 2796 - protein, 20 aa, Homo sapiens
WAICMLRVALATVYFQEEFL

SEQ ID NO: 2797 - protein, 20 aa, Homo sapiens
PEVLHMIYMRALQIVYGIRL

SEQ ID NO: 2798 - protein, 20 aa, Homo sapiens
PCEYYFRVYHSLCPISWVES

SEQ ID NO: 2799 - protein, 20 aa, Homo sapiens
EAARCMRRDFVKHLKKKLKR

SEQ ID NO: 2800 - protein, 20 aa, Homo sapiens
LIRKIYILMQNLGPLPNDVC

SEQ ID NO: 2801 - protein, 20 aa, Homo sapiens
HFVLLDMVHSLLHRLSHNDH

SEQ ID NO: 2802 - protein, 20 aa, Homo sapiens
NYIDQFLLTSFPTFTSVGVL

SEQ ID NO: 2803 - protein, 20 aa, Homo sapiens
FFAVLFLWRSFRSVTSRLYV

SEQ ID NO: 2804 - protein, 20 aa, Homo sapiens
HCDVCMFTSSRMSSFNRHMK

SEQ ID NO: 2805 - protein, 20 aa, Homo sapiens
MNFYLLLASSILCALIVFWK

SEQ ID NO: 2806 - protein, 20 aa, Homo sapiens
AATVPATAAGVVAVVVPVPA

SEQ ID NO: 2807 - protein, 20 aa, Homo sapiens
WVPTTHRRMISLFLLPACIF

SEQ ID NO: 2808 - protein, 20 aa, Homo sapiens
CSERVRTYWIIIELKHKARE

SEQ ID NO: 2809 - protein, 20 aa, Homo sapiens
QYTEHFMAAGYTAIEKVVQM

SEQ ID NO: 2810 - protein, 20 aa, Homo sapiens
YQPAPYFAAEARYPIYVIPE

SEQ ID NO: 2811 - protein, 20 aa, Homo sapiens
ETLIIAVLVSASIANLWLWM

SEQ ID NO: 2812 - protein, 20 aa, Homo sapiens
CSGSSYFVLANGHILPNSEN

SEQ ID NO: 2813 - protein, 20 aa, Homo sapiens
TLELYTSYLYLSMAFYFNRD

SEQ ID NO: 2814 - protein, 20 aa, Homo sapiens
TGILWLLMNNCFLNLSPRKP

SEQ ID NO: 2815 - protein, 20 aa, Homo sapiens
SVDSNFQYGWTPLMYAASVA

SEQ ID NO: 2816 - protein, 20 aa, Homo sapiens
FEFVGEFFTDVSLYILGSDI

SEQ ID NO: 2817 - protein, 20 aa, Homo sapiens
GKTLCYLMPGFIHLVLQPSL

SEQ ID NO: 2818 - protein, 20 aa, Homo sapiens
AKCVEFVKSFNLPMLMLGGG

SEQ ID NO: 2819 - protein, 20 aa, Homo sapiens
EASGFCYVNDIVLAILELLK

SEQ ID NO: 2820 - protein, 20 aa, Homo sapiens
GECVEYVKSFNIPLLVLGGG

SEQ ID NO: 2821 - protein, 20 aa, Homo sapiens
ALINLNVIWMVTPLSNANQP

SEQ ID NO: 2822 - protein, 20 aa, Homo sapiens
GYLGYLYLQWQPPLSLDHFK

SEQ ID NO: 2823 - protein, 20 aa, Homo sapiens
CDDSYHTFCLIPPLHDVPKG

SEQ ID NO: 2824 - protein, 20 aa, Homo sapiens
DDAAPRVEGVPVAVHKHALH

SEQ ID NO: 2825 - protein, 20 aa, Homo sapiens
CPDESWALKAIEALSGKIEL

SEQ ID NO: 2826 - protein, 20 aa, Homo sapiens
GIFIIVVFVYLTVENKSLFG

SEQ ID NO: 2827 - protein, 20 aa, Homo sapiens
KYSAHAFQFSPRNVLWLLVV

SEQ ID NO: 2828 - protein, 20 aa, Homo sapiens
VDPTGHSFVLVTSLGLTYDG

SEQ ID NO: 2829 - protein, 20 aa, Homo sapiens
VALSRKMAELVHFLLLKYRA

SEQ ID NO: 2830 - protein, 20 aa, Homo sapiens
FRAALSKKVADLIHFLLLKY

SEQ ID NO: 2831 - protein, 20 aa, Homo sapiens
VKDPVAWEAGMLMHFILRKY

SEQ ID NO: 2832 - protein, 20 aa, Homo sapiens
WTLPRNGLLMPLLSVIFLNG

SEQ ID NO: 2833 - protein, 20 aa, Homo sapiens
FLWGPRAYAETTKMRVLRVL

SEQ ID NO: 2834 - protein, 20 aa, Homo sapiens
RRRNGYRALMDKSLHVGTQC

SEQ ID NO: 2835 - protein, 20 aa, Homo sapiens
PARWSFRAYTSVLYFNPWMR

SEQ ID NO: 2836 - protein, 20 aa, Homo sapiens
VFCLTVVCWTWVPLRGPSSP

SEQ ID NO: 2837 - protein, 20 aa, Homo sapiens
NQKICIFVNHSTAPYSVKNK

SEQ ID NO: 2838 - protein, 20 aa, Homo sapiens
NTALHYAVYSEILSVVAKLL

SEQ ID NO: 2839 - protein, 20 aa, Homo sapiens
MVILTILAIAPSVPFAANCF

SEQ ID NO: 2840 - protein, 20 aa, Homo sapiens
SRLLEFYLAMPFATPMEAEL

SEQ ID NO: 2841 - protein, 20 aa, Homo sapiens
CLCDYKLYCLRPSLRSLERK

SEQ ID NO: 2842 - protein, 20 aa, Homo sapiens
LRAPAYSFRGAPMLLAENCS

SEQ ID NO: 2843 - protein, 20 aa, Homo sapiens
IPVGFHLYSTHAALAALRGH

SEQ ID NO: 2844 - protein, 20 aa, Homo sapiens
FPTYDYFNQVTLQLLDGFMI

SEQ ID NO: 2845 - protein, 20 aa, Homo sapiens
ASQDPFPAAIILKVALNMAR

SEQ ID NO: 2846 - protein, 20 aa, Homo sapiens
EMELWMKAMLDAALVQTEPV

SEQ ID NO: 2847 - protein, 20 aa, Homo sapiens
PAPCQYAHKLAFLVGQSIHR

SEQ ID NO: 2848 - protein, 20 aa, Homo sapiens
MRSVVGFVASINLTLTKWYS

SEQ ID NO: 2849 - protein, 20 aa, Homo sapiens
PAPCHYAHKLAYLVGQSIHQ

SEQ ID NO: 2850 - protein, 20 aa, Homo sapiens
LNKQGMMMSIATKIAMQMTC

SEQ ID NO: 2851 - protein, 20 aa, Homo sapiens
LCSIDWFMVTVHPFMLNNDV

SEQ ID NO: 2852 - protein, 20 aa, Homo sapiens
HLERLAYLHARLRELLCELG

SEQ ID NO: 2853 - protein, 20 aa, Homo sapiens
NASGAHALQPAAAILALLPA

SEQ ID NO: 2854 - protein, 20 aa, Homo sapiens
EKKIMHYMYQLCKSLDHIHR

SEQ ID NO: 2855 - protein, 20 aa, Homo sapiens
PTGLINMAATPIPAMSARDL

SEQ ID NO: 2856 - protein, 20 aa, Homo sapiens
KRCQHKIAEMVALMEKHKHQ

SEQ ID NO: 2857 - protein, 20 aa, Homo sapiens
QVPRTYAIMISRPAWLWGAE

SEQ ID NO: 2858 - protein, 20 aa, Homo sapiens
YKLPLFIAFIFSTLIFSGFS

SEQ ID NO: 2859 - protein, 20 aa, Homo sapiens
EEAVMYYTRSISALPTVVAY

SEQ ID NO: 2860 - protein, 20 aa, Homo sapiens
TGKLGFSFVRITALMVSCNR

SEQ ID NO: 2861 - protein, 20 aa, Homo sapiens
VEHPQMTFGRLHRIIPKIMP

SEQ ID NO: 2862 - protein, 20 aa, Homo sapiens
EKIVYVYMKLNYEVMTKLGF

SEQ ID NO: 2863 - protein, 20 aa, Homo sapiens
EHPQMTFGRLQGIFPKITPE

SEQ ID NO: 2864 - protein, 20 aa, Homo sapiens
PHPGTVISHSVAMLILIGSL

SEQ ID NO: 2865 - protein, 20 aa, Homo sapiens
LPASTLSRLSNRLLLRLECN

SEQ ID NO: 2866 - protein, 20 aa, Homo sapiens
YLPGYRYLNSWRPSLFYKIA

SEQ ID NO: 2867 - protein, 20 aa, Homo sapiens
AMIGCRLMSGILAVGPMFVR

SEQ ID NO: 2868 - protein, 20 aa, Homo sapiens
LTGATQMAYLGSLPVIGEKE

SEQ ID NO: 2869 - protein, 20 aa, Homo sapiens
TLYFYKFFLPTILSLSFFIL

SEQ ID NO: 2870 - protein, 20 aa, Homo sapiens
GFLEKEFYHKTNIKMRCEFL

SEQ ID NO: 2871 - protein, 20 aa, Homo sapiens
APSRTLLLALPLPLSLLAAL

SEQ ID NO: 2872 - protein, 20 aa, Homo sapiens
HLCKIMLFFRSNPYFQNKVI

SEQ ID NO: 2873 - protein, 20 aa, Homo sapiens
KGAATKMAAVTAPEAESAPA

SEQ ID NO: 2874 - protein, 20 aa, Homo sapiens
DVRDLNALLPAVPSLGGGGG

SEQ ID NO: 2875 - protein, 20 aa, Homo sapiens
SRQKKIRIQLRSQCATWKVI

SEQ ID NO: 2876 - protein, 20 aa, Homo sapiens
CKECGRAFNLNSHLIRHQRI

SEQ ID NO: 2877 - protein, 20 aa, Homo sapiens
PTSSASSFSSSAPFLASAVS

SEQ ID NO: 2878 - protein, 20 aa, Homo sapiens
SVWLGASVVAHLSTYQSEWM

SEQ ID NO: 2879 - protein, 20 aa, Homo sapiens
VFQLIGLTNAIFVSFNITII

SEQ ID NO: 2880 - protein, 20 aa, Homo sapiens
ETFMNKFIYEIARRHPFLYA

SEQ ID NO: 2881 - protein, 20 aa, Homo sapiens
SGQMVEHLMNSVMKLCVIIA

SEQ ID NO: 2882 - protein, 20 aa, Homo sapiens
AVLQWIAASQFNVPMLYFMG

SEQ ID NO: 2883 - protein, 20 aa, Homo sapiens
RCIIILVLQEPTAFRISVTS

SEQ ID NO: 2884 - protein, 20 aa, Homo sapiens
SVTSSCFVQNTLTKLLKDRR

SEQ ID NO: 2885 - protein, 20 aa, Homo sapiens
MLAKKHFSYAWPFYNPVDVN

SEQ ID NO: 2886 - protein, 20 aa, Homo sapiens
CKVDGFTHLYTLILRPDLSY

SEQ ID NO: 2887 - protein, 20 aa, Homo sapiens
CCHPSNFIIEAPGHMSDVEW

SEQ ID NO: 2888 - protein, 20 aa, Homo sapiens
IRLEHFYMMPVNSEVMYPHL

SEQ ID NO: 2889 - protein, 20 aa, Homo sapiens
NCYQNFLDYHRCLKTRTRRG

SEQ ID NO: 2890 - protein, 20 aa, Homo sapiens
VGHYTQLVWYSTYQVGCGIA

SEQ ID NO: 2891 - protein, 20 aa, Homo sapiens
PTAVRKRFFESIIKEAARCM

SEQ ID NO: 2892 - protein, 20 aa, Homo sapiens
HAAARNLWGNLPPLLLPQRL

SEQ ID NO: 2893 - protein, 20 aa, Homo sapiens
MFVIISLHNCVVISFVLFLF

SEQ ID NO: 2894 - protein, 20 aa, Homo sapiens
VRREKKFAVALSGLIEEKCK

SEQ ID NO: 2895 - protein, 20 aa, Homo sapiens
HICHTRFTQSGTMKIHILQK

SEQ ID NO: 2896 - protein, 20 aa, Homo sapiens
HISDSFLETNVPLLVLIEAA

SEQ ID NO: 2897 - protein, 20 aa, Homo sapiens
MLRLLRLALAFYGRTADPAE

SEQ ID NO: 2898 - protein, 20 aa, Homo sapiens
RWCPPPFFYRRRFVRGPRPP

SEQ ID NO: 2899 - protein, 20 aa, Homo sapiens
VLAFGLLLAAATATFAAAQE

SEQ ID NO: 2900 - protein, 20 aa, Homo sapiens
WDLMQNIMNDMPIYMYSVCN

SEQ ID NO: 2901 - protein, 20 aa, Homo sapiens
VPKQMMQMFGLGAISLILVC

SEQ ID NO: 2902 - protein, 20 aa, Homo sapiens
ACGLYYKLHNINRPLTMKKE

SEQ ID NO: 2903 - protein, 20 aa, Homo sapiens
IQKLKSFISFYSALPGYICS

SEQ ID NO: 2904 - protein, 20 aa, Homo sapiens
LLVLMAVVLASLIYRRRLMK

SEQ ID NO: 2905 - protein, 20 aa, Homo sapiens
NDLQMSNFVNLKNITYLVLD

SEQ ID NO: 2906 - protein, 20 aa, Homo sapiens
ASGFCYVNDIVLAILELLKY

SEQ ID NO: 2907 - protein, 20 aa, Homo sapiens
GAESGRYYCLNVPLRDGIDD

SEQ ID NO: 2908 - protein, 20 aa, Homo sapiens
TVTIRNISALSSGLYQCVAS

SEQ ID NO: 2909 - protein, 20 aa, Homo sapiens
YKLRYRYTLDDLYPMMNALK

SEQ ID NO: 2910 - protein, 20 aa, Homo sapiens
LHDGLRQVAGPGAAAAHLPR

SEQ ID NO: 2911 - protein, 20 aa, Homo sapiens
GTGAVGMACAISILLKDLAD

SEQ ID NO: 2912 - protein, 20 aa, Homo sapiens
STRKLYEKKLVQLLVSPPCA

SEQ ID NO: 2913 - protein, 20 aa, Homo sapiens
DYFPEIFREASVCMQLLFGI

SEQ ID NO: 2914 - protein, 20 aa, Homo sapiens
FQDFFPVIFSKASEYLQLVF

SEQ ID NO: 2915 - protein, 20 aa, Homo sapiens
PPQSPQGASALPTTISFTCW

SEQ ID NO: 2916 - protein, 20 aa, Homo sapiens
LKSPQGASAIPTAIDFTLWR

SEQ ID NO: 2917 - protein, 20 aa, Homo sapiens
FLWGPRAYAETSKMKVLEFL

SEQ ID NO: 2918 - protein, 20 aa, Homo sapiens
PREDAHFIYGYPKKGHGHSY

SEQ ID NO: 2919 - protein, 20 aa, Homo sapiens
KFRPGSVVVQLTLAFREGTI

SEQ ID NO: 2920 - protein, 20 aa, Homo sapiens
MVLPDVFIRCVVFCLTVVCW

SEQ ID NO: 2921 - protein, 20 aa, Homo sapiens
QYIPHLFSYSGHSPLLPQQA

SEQ ID NO: 2922 - protein, 20 aa, Homo sapiens
GQSQGSVLAFTRTFIATPGS

SEQ ID NO: 2923 - protein, 20 aa, Homo sapiens
LLKEFTVSGNILTIRLTAAD

SEQ ID NO: 2924 - protein, 20 aa, Homo sapiens
EKDVTYSYGLGSCVKIESPC

SEQ ID NO: 2925 - protein, 20 aa, Homo sapiens
PPTTGFMKHTPTKLRAPAYS

SEQ ID NO: 2926 - protein, 20 aa, Homo sapiens
SNRIHTSAHVMSMGLLHFYK

SEQ ID NO: 2927 - protein, 20 aa, Homo sapiens
SLGAVVFSRVTNNVVLEAPF

SEQ ID NO: 2928 - protein, 20 aa, Homo sapiens
DGPDTKRVCLRNEEQMKLPA

SEQ ID NO: 2929 - protein, 20 aa, Homo sapiens
GLTLWEMMTLSIPHINLSND

SEQ ID NO: 2930 - protein, 20 aa, Homo sapiens
NRKYAFKAAHPNMRTYYFCT

SEQ ID NO: 2931 - protein, 20 aa, Homo sapiens
GKQQTVMAIATKIALQMNCK

SEQ ID NO: 2932 - protein, 20 aa, Homo sapiens
CLRYYNILFRRTFKLLDFEQ

SEQ ID NO: 2933 - protein, 20 aa, Homo sapiens
YFERKLLFSADVSYKVLRNE

SEQ ID NO: 2934 - protein, 20 aa, Homo sapiens
FKFIGLMILLTSAFSAGSGQ

SEQ ID NO: 2935 - protein, 20 aa, Homo sapiens
RHSQTLKAMVQAWPFTCLPL

SEQ ID NO: 2936 - protein, 20 aa, Homo sapiens
PGSPRSWLLLCPLSHVLFRA

SEQ ID NO: 2937 - protein, 20 aa, Homo sapiens
MAGLALQPGTALLCYSCKAQ

SEQ ID NO: 2938 - protein, 20 aa, Homo sapiens
QVRGGMVFELANSIVLPFDC

SEQ ID NO: 2939 - protein, 20 aa, Homo sapiens
AASDNVFSTVPPAFINMAAT

SEQ ID NO: 2940 - protein, 20 aa, Homo sapiens
EDANSCHSFQSAYLIVDRDE

SEQ ID NO: 2941 - protein, 20 aa, Homo sapiens
LWTWWINFLFAAVVAWCTLI

SEQ ID NO: 2942 - protein, 20 aa, Homo sapiens
QFIPSTMAAAAASGLSPLQL

SEQ ID NO: 2943 - protein, 20 aa, Homo sapiens
KGIVLVALADGTLAIFHRGV

SEQ ID NO: 2944 - protein, 20 aa, Homo sapiens
MIITTWIVYILARKGVGLPF

SEQ ID NO: 2945 - protein, 20 aa, Homo sapiens
DSILRRPYVTCQPFWRKEME

SEQ ID NO: 2946 - protein, 20 aa, Homo sapiens
FLKDHRISTFKNWPFLEGCA

SEQ ID NO: 2947 - protein, 20 aa, Homo sapiens
VTGYKMLYQNDLHLTPTLHL

SEQ ID NO: 2948 - protein, 20 aa, Homo sapiens
ECNVVIIAHCNLEPLVSRDP

SEQ ID NO: 2949 - protein, 20 aa, Homo sapiens
IPVWGLQLLLPLLLPSFIHF

SEQ ID NO: 2950 - protein, 20 aa, Homo sapiens
EPTFSFFSGPYMVMTNLVWN

SEQ ID NO: 2951 - protein, 20 aa, Homo sapiens
GLPIILHLFALSTLYFYKFF

SEQ ID NO: 2952 - protein, 20 aa, Homo sapiens
KIKKIVHSIVSSFAFGLFGV

SEQ ID NO: 2953 - protein, 20 aa, Homo sapiens
IKMRCEFLACWPAFTVLGEA

SEQ ID NO: 2954 - protein, 20 aa, Homo sapiens
QNYSSNAYHMSSTMKPNTKC

SEQ ID NO: 2955 - protein, 20 aa, Homo sapiens
IWRDIDFAHEAPAFLPWHRL

SEQ ID NO: 2956 - protein, 20 aa, Homo sapiens
ASSGQARMFPNAPYLPSCLE

SEQ ID NO: 2957 - protein, 20 aa, Homo sapiens
KKIRIQLRSQCATWKVICKS

SEQ ID NO: 2958 - protein, 20 aa, Homo sapiens
LRRLELASNHFLYLPRDVLA

SEQ ID NO: 2959 - protein, 20 aa, Homo sapiens
CDTDYIQYPNYCSFKSQQCL

SEQ ID NO: 2960 - protein, 20 aa, Homo sapiens
WNEPQMVFPNIVNYLPCKEN

SEQ ID NO: 2961 - protein, 20 aa, Homo sapiens
RYIENIYHSKPMRWPFFLFI

SEQ ID NO: 2962 - protein, 20 aa, Homo sapiens
PRCIIILVLQEPTPFRISVT

SEQ ID NO: 2963 - protein, 20 aa, Homo sapiens
ECIEDFNTMFSNCYLYNKPG

SEQ ID NO: 2964 - protein, 20 aa, Homo sapiens
EACRETYMEFLWQYKSSADK

SEQ ID NO: 2965 - protein, 20 aa, Homo sapiens
TRRGKSTQPCEYYFRVYHSL

SEQ ID NO: 2966 - protein, 20 aa, Homo sapiens
NQDSLKYYYVCQYCPAGNNM

SEQ ID NO: 2967 - protein, 20 aa, Homo sapiens
ECYQFKFKYTNNGPLMDFIS

SEQ ID NO: 2968 - protein, 20 aa, Homo sapiens
VVARRYPASGIHFVLLDMVH

SEQ ID NO: 2969 - protein, 20 aa, Homo sapiens
WELVIRAAVAGFFAVLFLWR

SEQ ID NO: 2970 - protein, 20 aa, Homo sapiens
CNDCNMAFVTSGELVRHRRY

SEQ ID NO: 2971 - protein, 20 aa, Homo sapiens
SSILCALIVFWKYRRFQRNT

SEQ ID NO: 2972 - protein, 20 aa, Homo sapiens
ADKPVLAIQVLGTVKWFNVR

SEQ ID NO: 2973 - protein, 20 aa, Homo sapiens
VLLLLLSTLVIPSAAAPIHD

SEQ ID NO: 2974 - protein, 20 aa, Homo sapiens
CKKCNLIAERQRVMAAQVAL

SEQ ID NO: 2975 - protein, 20 aa, Homo sapiens
TNTVEVITSAPGAMLASWAR

SEQ ID NO: 2976 - protein, 20 aa, Homo sapiens
MNDMPIYMYSVCNVMSGDQD

SEQ ID NO: 2977 - protein, 20 aa, Homo sapiens
IWILLFVCYYLSYYLCSGSS

SEQ ID NO: 2978 - protein, 20 aa, Homo sapiens
YYWPRPRRYVQPPEMIGPMR

SEQ ID NO: 2979 - protein, 20 aa, Homo sapiens
HHPGLSHSYMDAAQYPLPEE

SEQ ID NO: 2980 - protein, 20 aa, Homo sapiens
GECCKYSYKGLRSVCVYGGG

SEQ ID NO: 2981 - protein, 20 aa, Homo sapiens
ISKVMEMYQPSAVVLQCGAD

SEQ ID NO: 2982 - protein, 20 aa, Homo sapiens
KPHRLALTHSLVLHYGLYKK

SEQ ID NO: 2983 - protein, 20 aa, Homo sapiens
AVLPCTFTTSAALINLNVIW

SEQ ID NO: 2984 - protein, 20 aa, Homo sapiens
QDMDCVYYNWQYLLCSWKPG

SEQ ID NO: 2985 - protein, 20 aa, Homo sapiens
QCAGEFVITFPRAYHSGFNQ

SEQ ID NO: 2986 - protein, 20 aa, Homo sapiens
GVPVAVHKHALHDGLRQVAG

SEQ ID NO: 2987 - protein, 20 aa, Homo sapiens
PVSGPFLVKTGYAFVDCPDE

SEQ ID NO: 2988 - protein, 20 aa, Homo sapiens
PDFSMYVYEVTKSILPITNI

SEQ ID NO: 2989 - protein, 20 aa, Homo sapiens
LHITMPFSSPMEAELVRRIL

SEQ ID NO: 2990 - protein, 20 aa, Homo sapiens
PRIETILMMYTRNNLNCAEP

SEQ ID NO: 2991 - protein, 20 aa, Homo sapiens
DPACYEFLWGPRALVETSYV

SEQ ID NO: 2992 - protein, 20 aa, Homo sapiens
PDPESVFRAALSKKVADLIH

SEQ ID NO: 2993 - protein, 20 aa, Homo sapiens
AALSRKVAKLVHFLLLKYRA

SEQ ID NO: 2994 - protein, 20 aa, Homo sapiens
DPAGHSYILVTALGLSCDSM

SEQ ID NO: 2995 - protein, 20 aa, Homo sapiens
ALPKSGLLMSLLVVIFMNGN

SEQ ID NO: 2996 - protein, 20 aa, Homo sapiens
KVVEFLAMLKNTVPITFPSS

SEQ ID NO: 2997 - protein, 20 aa, Homo sapiens
AGREHFVYGEPRELLTKVWV

SEQ ID NO: 2998 - protein, 20 aa, Homo sapiens
IGCWYCRRRNGYRALMDKSL

SEQ ID NO: 2999 - protein, 20 aa, Homo sapiens
AYTSVLYFNPWMRIFIQAKR

SEQ ID NO: 3000 - protein, 20 aa, Homo sapiens
LVALAIVYLIALAVCQCRRK

SEQ ID NO: 3001 - protein, 20 aa, Homo sapiens
GSYRKWMCFSESQVQPTQKQ

SEQ ID NO: 3002 - protein, 20 aa, Homo sapiens
SLVSVYNSYPYYPYLYCVGS

SEQ ID NO: 3003 - protein, 20 aa, Homo sapiens
ESSYVFLHVCIQEFCAALFY

SEQ ID NO: 3004 - protein, 20 aa, Homo sapiens
AFREQYMGMSVPPHYQYIPH

SEQ ID NO: 3005 - protein, 20 aa, Homo sapiens
HTPHKTLMPYASLFQSHSCK

SEQ ID NO: 3006 - protein, 20 aa, Homo sapiens
LQQLSLLMWITQCFLPVFLA

SEQ ID NO: 3007 - protein, 20 aa, Homo sapiens
CDLHPYPYCLCYSKRSRSCG

SEQ ID NO: 3008 - protein, 20 aa, Homo sapiens
RGPIMALYSSPGPKYLIPPT

SEQ ID NO: 3009 - protein, 20 aa, Homo sapiens
QCHAVLADSVHLAWDLSRSL

SEQ ID NO: 3010 - protein, 20 aa, Homo sapiens
QEDRLYLVGNVCILRTQLLQ

SEQ ID NO: 3011 - protein, 20 aa, Homo sapiens
GFTTSILQYENSIMLCTDVS

SEQ ID NO: 3012 - protein, 20 aa, Homo sapiens
CIPFYNVVFRRVMKLLDMKL

SEQ ID NO: 3013 - protein, 20 aa, Homo sapiens
NHVQPHAYQFTYRVTECGIR

SEQ ID NO: 3014 - protein, 20 aa, Homo sapiens
LQHLIGLSNLTHVLYPVPLE

SEQ ID NO: 3015 - protein, 20 aa, Homo sapiens
CWTARIRAVGLLTVISKGCS

SEQ ID NO: 3016 - protein, 20 aa, Homo sapiens
SAGCVFYEIASLQPLFPGVN

SEQ ID NO: 3017 - protein, 20 aa, Homo sapiens
MAITQFRLFKFCTCLATVFS

SEQ ID NO: 3018 - protein, 20 aa, Homo sapiens
PNNVLSTVQPVIIYLTATGI

SEQ ID NO: 3019 - protein, 20 aa, Homo sapiens
CKALMRFIMVTSVISLILLV

SEQ ID NO: 3020 - protein, 20 aa, Homo sapiens
RALELHPFSMKPLLRRAMAY

SEQ ID NO: 3021 - protein, 20 aa, Homo sapiens
SAQKFSLILKILSMIYKLVQ

SEQ ID NO: 3022 - protein, 20 aa, Homo sapiens
TSEKINMISGVLQRYCRFGS

SEQ ID NO: 3023 - protein, 20 aa, Homo sapiens
MGAPTLPPAWQPFLKDHRIS

SEQ ID NO: 3024 - protein, 20 aa, Homo sapiens
DKKTFYKTADISQMLVCTAD

SEQ ID NO: 3025 - protein, 20 aa, Homo sapiens
LSNRLLLRLECNVVIIAHCN

SEQ ID NO: 3026 - protein, 20 aa, Homo sapiens
ECYQPYYLPGYRYLNSWRPS

SEQ ID NO: 3027 - protein, 20 aa, Homo sapiens
YWTERFLEDTTLTITVPAVS

SEQ ID NO: 3028 - protein, 20 aa, Homo sapiens
PYRLPALFELYPEFLLVFKE

SEQ ID NO: 3029 - protein, 20 aa, Homo sapiens
DVKVQFFYSNLPTYYDNCSF

SEQ ID NO: 3030 - protein, 20 aa, Homo sapiens
ICAGTIIASQWVLTVAHCLI

SEQ ID NO: 3031 - protein, 20 aa, Homo sapiens
LFVWMHYYVSMDALLGGSEI

SEQ ID NO: 3032 - protein, 20 aa, Homo sapiens
GCNKRYFKLSHLQMHSRKHT

SEQ ID NO: 3033 - protein, 20 aa, Homo sapiens
VICKSCISQTPGINLDLGSG

SEQ ID NO: 3034 - protein, 20 aa, Homo sapiens
QILELLVLEQFLTILPGDLQ

SEQ ID NO: 3035 - protein, 20 aa, Homo sapiens
HYRCSNHVYYAKRVLCSQPV

SEQ ID NO: 3036 - protein, 20 aa, Homo sapiens
HVPSVLLADQLQMSLYASGL

SEQ ID NO: 3037 - protein, 20 aa, Homo sapiens
CAIVTFMNKTLGTFSIAVAH

SEQ ID NO: 3038 - protein, 20 aa, Homo sapiens
LNEELDFLVTSYEEIIECAD

SEQ ID NO: 3039 - protein, 20 aa, Homo sapiens
MARALVQLWAICMLRVALAT

SEQ ID NO: 3040 - protein, 20 aa, Homo sapiens
EVMYPHLMEGFLPFSNLVTH

SEQ ID NO: 3041 - protein, 20 aa, Homo sapiens
RVYHSLCPISWVESWNEQIK

SEQ ID NO: 3042 - protein, 20 aa, Homo sapiens
SSDPTSWSSAIQSWYDEILD

SEQ ID NO: 3043 - protein, 20 aa, Homo sapiens
DSPSYQKRQRMALLARKQGA

SEQ ID NO: 3044 - protein, 20 aa, Homo sapiens
VKRLLAVSVSCITYLRGIFP

SEQ ID NO: 3045 - protein, 20 aa, Homo sapiens
VISFVLFLFGGNNFIQNFYL

SEQ ID NO: 3046 - protein, 20 aa, Homo sapiens
SHPYGFPWELVIRAAVAGFF

SEQ ID NO: 3047 - protein, 20 aa, Homo sapiens
RPDSNLYGFPWELVICAAVV

SEQ ID NO: 3048 - protein, 20 aa, Homo sapiens
SPPAPARRHLLVLLLLLSTL

SEQ ID NO: 3049 - protein, 20 aa, Homo sapiens
SQDSGLVSLSSSSPISNKST

SEQ ID NO: 3050 - protein, 20 aa, Homo sapiens
TSAPGAMLASWARIAARAVQ

SEQ ID NO: 3051 - protein, 20 aa, Homo sapiens
ECVCENYKLAVNCFVNNNRQ

SEQ ID NO: 3052 - protein, 20 aa, Homo sapiens
ESTVCLMSYERRQILHLITM

SEQ ID NO: 3053 - protein, 20 aa, Homo sapiens
SHYVAQTGILWLLMNNCFLN

SEQ ID NO: 3054 - protein, 20 aa, Homo sapiens
LLKERDITLRHLLTMREDEF

SEQ ID NO: 3055 - protein, 20 aa, Homo sapiens
SHISPFSHSSHMLTTPTPMH

SEQ ID NO: 3056 - protein, 20 aa, Homo sapiens
ATWPHSVHRLAQSYLKEPMI

SEQ ID NO: 3057 - protein, 20 aa, Homo sapiens
NVARCWTYETAVALDCEIPN

SEQ ID NO: 3058 - protein, 20 aa, Homo sapiens
NVARCWTYETSLLVEEAISE

SEQ ID NO: 3059 - protein, 20 aa, Homo sapiens
RQQSKAHRHRHRRGYSRCRS

SEQ ID NO: 3060 - protein, 20 aa, Homo sapiens
APLLLLSLHGVAASLEVSES

SEQ ID NO: 3061 - protein, 20 aa, Homo sapiens
LAIGCLYTFLISTTFGCTSS

SEQ ID NO: 3062 - protein, 20 aa, Homo sapiens
AVHKHALHDGLRQVAGPGAA

SEQ ID NO: 3063 - protein, 20 aa, Homo sapiens
HVKKGIFYHRALLFKALADR

SEQ ID NO: 3064 - protein, 20 aa, Homo sapiens
WREEGFPVGLKLAVLGIFII

SEQ ID NO: 3065 - protein, 20 aa, Homo sapiens
PEEVIWEALNMMGLYDGMEH

SEQ ID NO: 3066 - protein, 20 aa, Homo sapiens
KIIDLVHLLLRKYRVKGLIT

SEQ ID NO: 3067 - protein, 20 aa, Homo sapiens
PACYEFLWGPRALVETSYVK

SEQ ID NO: 3068 - protein, 20 aa, Homo sapiens
DPIGHLYIFATCLGLSYDGL

SEQ ID NO: 3069 - protein, 20 aa, Homo sapiens
PACYEFLWGPRALIETSYVK

SEQ ID NO: 3070 - protein, 20 aa, Homo sapiens
RVQAAAMLNDGSSAMGRKCS

SEQ ID NO: 3071 - protein, 20 aa, Homo sapiens
KCVRREYKPYFPQILNRTSQ

SEQ ID NO: 3072 - protein, 20 aa, Homo sapiens
HSYTTAEEAAGIGILTVILG

SEQ ID NO: 3073 - protein, 20 aa, Homo sapiens
GKGKICMIVNISQCYLAYDE

SEQ ID NO: 3074 - protein, 20 aa, Homo sapiens
WSDNKIFRDRFLYTFYFCCR

SEQ ID NO: 3075 - protein, 20 aa, Homo sapiens
RFTPVDFHYVRNRACFFVQD

SEQ ID NO: 3076 - protein, 20 aa, Homo sapiens
ILSVVAKLLSHGAVIEVHNK

SEQ ID NO: 3077 - protein, 20 aa, Homo sapiens
AEDWNLYWRTSSFRMTEHNS

SEQ ID NO: 3078 - protein, 20 aa, Homo sapiens
AADHRQLQLSISSCLQQLSL

SEQ ID NO: 3079 - protein, 20 aa, Homo sapiens
LGSKKYSYMNICKEFSLPPC

SEQ ID NO: 3080 - protein, 20 aa, Homo sapiens
ENGKVTFIFSTLMLFPINIW

SEQ ID NO: 3081 - protein, 20 aa, Homo sapiens
GDGPDVREGIMPTFDLTKVL

SEQ ID NO: 3082 - protein, 20 aa, Homo sapiens
NEFPVVFSGLFSSHLCADFA

SEQ ID NO: 3083 - protein, 20 aa, Homo sapiens
ILTIPMHFWALFYPKRAMDQ

SEQ ID NO: 3084 - protein, 20 aa, Homo sapiens
YVTSVLQYENSITLCADVSH

SEQ ID NO: 3085 - protein, 20 aa, Homo sapiens
PAPCQYAHKLTFLVAQSIHK

SEQ ID NO: 3086 - protein, 20 aa, Homo sapiens
MVTVHPFMLNNDVCVHFHEL

SEQ ID NO: 3087 - protein, 20 aa, Homo sapiens
EKEEQYIAQFTSQFLSLQCL

SEQ ID NO: 3088 - protein, 20 aa, Homo sapiens
SILNKWWILTAAHCLYSEEL

SEQ ID NO: 3089 - protein, 20 aa, Homo sapiens
LQPAAAILALLPALGLLLWG

SEQ ID NO: 3090 - protein, 20 aa, Homo sapiens
VDCTPLMYSLVHNLTKELKS

SEQ ID NO: 3091 - protein, 20 aa, Homo sapiens
ALICELMDMNIYELIRGRRY

SEQ ID NO: 3092 - protein, 20 aa, Homo sapiens
FKFCTCLATVFSFLKRLICR

SEQ ID NO: 3093 - protein, 20 aa, Homo sapiens
GDPSCVIMQNWARIEARLCN

SEQ ID NO: 3094 - protein, 20 aa, Homo sapiens
LLVFIIFVRCNPVQFAGINE

SEQ ID NO: 3095 - protein, 20 aa, Homo sapiens
NKECAIYTNRALCYLKLCQF

SEQ ID NO: 3096 - protein, 20 aa, Homo sapiens
IRWSHTRIFQVPSEMTEDIM

SEQ ID NO: 3097 - protein, 20 aa, Homo sapiens
SWENIKFEDSVGLQMVSHCT

SEQ ID NO: 3098 - protein, 20 aa, Homo sapiens
AMTKLGFKVTLPPFMCNKQA

SEQ ID NO: 3099 - protein, 20 aa, Homo sapiens
AMTKLGFKATLPPFMCNKRA

SEQ ID NO: 3100 - protein, 20 aa, Homo sapiens
AMTKLGFKATLPPFMRNKRV

SEQ ID NO: 3101 - protein, 20 aa, Homo sapiens
KHSSGCAFLSVKKQFEELTL

SEQ ID NO: 3102 - protein, 20 aa, Homo sapiens
KAEELLAAAAQRHQQLQQKC

SEQ ID NO: 3103 - protein, 20 aa, Homo sapiens
PASASLFQDTCAGCASLLHG

SEQ ID NO: 3104 - protein, 20 aa, Homo sapiens
WYRASVLAYASEESVLVGYV

SEQ ID NO: 3105 - protein, 20 aa, Homo sapiens
LRPPTILPTLRSALFSRYSP

SEQ ID NO: 3106 - protein, 20 aa, Homo sapiens
VEVKGCTAMIGCRLMSGILA

SEQ ID NO: 3107 - protein, 20 aa, Homo sapiens
IYSFGFGKAMPWFQFYLTGA

SEQ ID NO: 3108 - protein, 20 aa, Homo sapiens
CGKGYAWISPCKMSLHFCLC

SEQ ID NO: 3109 - protein, 20 aa, Homo sapiens
WPTEWIFNPYRLPALFELYP

SEQ ID NO: 3110 - protein, 20 aa, Homo sapiens
LFIKHFIIYSIPRYVRDLKI

SEQ ID NO: 3111 - protein, 20 aa, Homo sapiens
NGQALALPAPSRTLLLALPL

SEQ ID NO: 3112 - protein, 20 aa, Homo sapiens
LLGAAMVGAVLTALLAGLVS

SEQ ID NO: 3113 - protein, 20 aa, Homo sapiens
EEQCLSAFTVHFSGQFTGTA

SEQ ID NO: 3114 - protein, 20 aa, Homo sapiens
WKVICKSCISQTPGINLDLG

SEQ ID NO: 3115 - protein, 20 aa, Homo sapiens
LHLGSRQKKIRIQLRSQCAT

SEQ ID NO: 3116 - protein, 20 aa, Homo sapiens
CEGGTDVKGKILPKAEHFKM

SEQ ID NO: 3117 - protein, 20 aa, Homo sapiens
SECGKTFRVSSHLIRHFRIH

SEQ ID NO: 3118 - protein, 20 aa, Homo sapiens
PTEYERFFALLTPTWKAETT

SEQ ID NO: 3119 - protein, 20 aa, Homo sapiens
KMLEILFELLHVPSVLLADQ

SEQ ID NO: 3120 - protein, 20 aa, Homo sapiens
ESLAVILAQLLSLSMGITYD

SEQ ID NO: 3121 - protein, 20 aa, Homo sapiens
NITPRMQHDTSHLFTTLGLR

SEQ ID NO: 3122 - protein, 20 aa, Homo sapiens
EPTAFRISVTSSCFVQNTLT

SEQ ID NO: 3123 - protein, 20 aa, Homo sapiens
EPTPFRISVTSSCFVQNTLT

SEQ ID NO: 3124 - protein, 20 aa, Homo sapiens
PSQNQIRNCYQNFLDYHRCL

SEQ ID NO: 3125 - protein, 20 aa, Homo sapiens
MALLPVLFLVTVLLPSLPAE

SEQ ID NO: 3126 - protein, 20 aa, Homo sapiens
TQLVKWMLGCYDALQKKYLR

SEQ ID NO: 3127 - protein, 20 aa, Homo sapiens
MVHSLLHRLSHNDHILIENR

SEQ ID NO: 3128 - protein, 20 aa, Homo sapiens
LTSFPTFTSVGVLIVLVLCS

SEQ ID NO: 3129 - protein, 20 aa, Homo sapiens
RYCSAVFHERYALIQHQKTH

SEQ ID NO: 3130 - protein, 20 aa, Homo sapiens
AKNLMNAVVLTVKASYVAST

SEQ ID NO: 3131 - protein, 20 aa, Homo sapiens
VMVESIQFCFIWRAISITPV

SEQ ID NO: 3132 - protein, 20 aa, Homo sapiens
MSEVEAAAGATAVPAATVPA

SEQ ID NO: 3133 - protein, 20 aa, Homo sapiens
HAMSSQYRMHSYYPPPSYLG

SEQ ID NO: 3134 - protein, 20 aa, Homo sapiens
AVVAGIVVLVISRKKRMAKY

SEQ ID NO: 3135 - protein, 20 aa, Homo sapiens
AARACFALLWGCALAAAAAA

SEQ ID NO: 3136 - protein, 20 aa, Homo sapiens
GSVASYILASHNGISYKDLD

SEQ ID NO: 3137 - protein, 20 aa, Homo sapiens
EQGATWRHRETLIIAVLVSA

SEQ ID NO: 3138 - protein, 20 aa, Homo sapiens
SCRKLFYFKIWAFLDVSFVE

SEQ ID NO: 3139 - protein, 20 aa, Homo sapiens
LEALLNFFFPTTCNLRENQV

SEQ ID NO: 3140 - protein, 20 aa, Homo sapiens
AAINSHITLELYTSYLYLSM

SEQ ID NO: 3141 - protein, 20 aa, Homo sapiens
GPVTAQVVLQAAIPLTSCGS

SEQ ID NO: 3142 - protein, 20 aa, Homo sapiens
NVARCWTYETAVALDTEIPN

SEQ ID NO: 3143 - protein, 20 aa, Homo sapiens
ASGFCYVNDIVIGILELLKY

SEQ ID NO: 3144 - protein, 20 aa, Homo sapiens
KPGIGVLLDTNYNLFYWYEG

SEQ ID NO: 3145 - protein, 20 aa, Homo sapiens
LDLLKSEYPVIQLLALKTLG

SEQ ID NO: 3146 - protein, 20 aa, Homo sapiens
AQGDGCRGVAFNVMFSAPHI

SEQ ID NO: 3147 - protein, 20 aa, Homo sapiens
CTYKIQRLMLKSLTYPERPP

SEQ ID NO: 3148 - protein, 20 aa, Homo sapiens
GLVCVQAATSSSSPLVLGTL

SEQ ID NO: 3149 - protein, 20 aa, Homo sapiens
AAISRKMVELVHFLLLKYRA

SEQ ID NO: 3150 - protein, 20 aa, Homo sapiens
KTGLLIIVLGTIAMEGDSAS

SEQ ID NO: 3151 - protein, 20 aa, Homo sapiens
GGASSSISVYYTLWSQFDEG

SEQ ID NO: 3152 - protein, 20 aa, Homo sapiens
SWDFPRRKLLMPLLGVIFLN

SEQ ID NO: 3153 - protein, 20 aa, Homo sapiens
PGLYPHLYEDALIDEVERAL

SEQ ID NO: 3154 - protein, 20 aa, Homo sapiens
GIGILTVILGVLLLIGCWYC

SEQ ID NO: 3155 - protein, 20 aa, Homo sapiens
NSYPYYPYLYCVGSWSPAFW

SEQ ID NO: 3156 - protein, 20 aa, Homo sapiens
AIFYCLFEMQDPAFVKQAVN

SEQ ID NO: 3157 - protein, 20 aa, Homo sapiens
KDYTCLLSSTWQELILLSSL

SEQ ID NO: 3158 - protein, 20 aa, Homo sapiens
IDIILNRRNCMAATLKIIER

SEQ ID NO: 3159 - protein, 20 aa, Homo sapiens
MYGTSLYQFIPLTFVMPNDY

SEQ ID NO: 3160 - protein, 20 aa, Homo sapiens
KRELAKLRRTTNRILASSCC

SEQ ID NO: 3161 - protein, 20 aa, Homo sapiens
SSPGPKYLIPPTTGFMKHTP

SEQ ID NO: 3162 - protein, 20 aa, Homo sapiens
THSFRWMAQVLASELSLVAF

SEQ ID NO: 3163 - protein, 20 aa, Homo sapiens
LRGHFCLSSDKMVCYLLKTK

SEQ ID NO: 3164 - protein, 20 aa, Homo sapiens
GNVCILRTQLLQQLYTSKAV

SEQ ID NO: 3165 - protein, 20 aa, Homo sapiens
LWKKRWFVLSDLCLFYYRDE

SEQ ID NO: 3166 - protein, 20 aa, Homo sapiens
VTGNVTAFDGSILYLPVKLQ

SEQ ID NO: 3167 - protein, 20 aa, Homo sapiens
RELPLLNAMPLHSWLILYSR

SEQ ID NO: 3168 - protein, 20 aa, Homo sapiens
DVSYKVLRNETVLEFMTALC

SEQ ID NO: 3169 - protein, 20 aa, Homo sapiens
GTPSKFVIPVSCAAPQKSPW

SEQ ID NO: 3170 - protein, 20 aa, Homo sapiens
RAVGLLTVISKGCSLNCVDD

SEQ ID NO: 3171 - protein, 20 aa, Homo sapiens
PSNALSTVLPGLAYLATADM

SEQ ID NO: 3172 - protein, 20 aa, Homo sapiens
GNAKYANMWLEYYNLERAHG

SEQ ID NO: 3173 - protein, 20 aa, Homo sapiens
VPDKLRSLALGVSYVILRIF

SEQ ID NO: 3174 - protein, 20 aa, Homo sapiens
MSIPFSNTHYRIPQGFGNLL

SEQ ID NO: 3175 - protein, 20 aa, Homo sapiens
IEQVRRSISRLTDVSAQDFS

SEQ ID NO: 3176 - protein, 20 aa, Homo sapiens
MCIYKYGSMSMSFEAHHLTV

SEQ ID NO: 3177 - protein, 20 aa, Homo sapiens
EHAWTHRLRERKQLVIYEEI

SEQ ID NO: 3178 - protein, 20 aa, Homo sapiens
HKDLWDFHMPERLAKEICAL

SEQ ID NO: 3179 - protein, 20 aa, Homo sapiens
PDEVENQFILRLPLEHACTV

SEQ ID NO: 3180 - protein, 20 aa, Homo sapiens
AQDAGVYQCLASNPVGTVVS

SEQ ID NO: 3181 - protein, 20 aa, Homo sapiens
CNLEPLVSRDPPASASLFQD

SEQ ID NO: 3182 - protein, 20 aa, Homo sapiens
TIQANVLEIISPNLFYALPK

SEQ ID NO: 3183 - protein, 20 aa, Homo sapiens
EEAITIVQHSSPPGLIVTSY

SEQ ID NO: 3184 - protein, 20 aa, Homo sapiens
LLKAGVISAQNIYSFGFGKA

SEQ ID NO: 3185 - protein, 20 aa, Homo sapiens
TSSDRTINLLEVLPWPTEWI

SEQ ID NO: 3186 - protein, 20 aa, Homo sapiens
YDNCSFYFWLHTSFIENNRL

SEQ ID NO: 3187 - protein, 20 aa, Homo sapiens
VQELRRQNYSSNAYHMSSTM

SEQ ID NO: 3188 - protein, 20 aa, Homo sapiens
ECDNFYHNFTKIPTLVQIIK

SEQ ID NO: 3189 - protein, 20 aa, Homo sapiens
ECMTWNQMNLGATLKGVAAG

SEQ ID NO: 3190 - protein, 20 aa, Homo sapiens
NECGKAFRHSSKLARHQRIH

SEQ ID NO: 3191 - protein, 20 aa, Homo sapiens
LYGGLHMDFWCARLATKGCE

SEQ ID NO: 3192 - protein, 20 aa, Homo sapiens
VVDSGYGLTRVQPFHQGRPL

SEQ ID NO: 3193 - protein, 20 aa, Homo sapiens
KTSYLVLRPHDVAFLLVYRE

SEQ ID NO: 3194 - protein, 20 aa, Homo sapiens
FTTLGLRGLSGIGAFRGMCT

SEQ ID NO: 3195 - protein, 20 aa, Homo sapiens
ISLADLATIFFAQFVQEATY

SEQ ID NO: 3196 - protein, 20 aa, Homo sapiens
FLNLVQCIQNKPLYFADRLY

SEQ ID NO: 3197 - protein, 20 aa, Homo sapiens
ALQIVYGIRLEHFYMMPVNS

SEQ ID NO: 3198 - protein, 20 aa, Homo sapiens
KSPNAVVGHYTQLVWYSTYQ

SEQ ID NO: 3199 - protein, 20 aa, Homo sapiens
DKTEKVAVDPETVFKRPREC

SEQ ID NO: 3200 - protein, 20 aa, Homo sapiens
NFYLPQNYIDQFLLTSFPTF

SEQ ID NO: 3201 - protein, 20 aa, Homo sapiens
PQRQDRFYSNCARLSGPAEL

SEQ ID NO: 3202 - protein, 20 aa, Homo sapiens
AAVVGFFAVLFFLWRSFRSV

SEQ ID NO: 3203 - protein, 20 aa, Homo sapiens
CHLCLKTFRTVTLLRNHVNT

SEQ ID NO: 3204 - protein, 20 aa, Homo sapiens
VFWKYRRFQRNTGEMSSNST

SEQ ID NO: 3205 - protein, 20 aa, Homo sapiens
VSRVPVYAHITHKALKDIPK

SEQ ID NO: 3206 - protein, 20 aa, Homo sapiens
CPDCAKRNKKMMKRLMTVEK

SEQ ID NO: 3207 - protein, 20 aa, Homo sapiens
DVWSFGIVMWEVMTYGERPY

SEQ ID NO: 3208 - protein, 20 aa, Homo sapiens
IKNLERYMCSRFFIDFPHIE

SEQ ID NO: 3209 - protein, 20 aa, Homo sapiens
SMRPTLIDLLPTFRHTLQKL

SEQ ID NO: 3210 - protein, 20 aa, Homo sapiens
SSGTTSFKCFAPFRDVPKQM

SEQ ID NO: 3211 - protein, 20 aa, Homo sapiens
DPNVACRRLMTPIMYAARDG

SEQ ID NO: 3212 - protein, 20 aa, Homo sapiens
ADQPRWVSHHHPAVLNGQHP

SEQ ID NO: 3213 - protein, 20 aa, Homo sapiens
HSPLKLLTSMAISVVCFFFL

SEQ ID NO: 3214 - protein, 20 aa, Homo sapiens
SSGTLISRALVVTHTYLEPG

SEQ ID NO: 3215 - protein, 20 aa, Homo sapiens
MSKVMEMFQPSAVVLQCGSD

SEQ ID NO: 3216 - protein, 20 aa, Homo sapiens
GVEEAFYTTDRVMTVSFHKY

SEQ ID NO: 3217 - protein, 20 aa, Homo sapiens
GVQEAFYLTDRVMTVSFHKY

SEQ ID NO: 3218 - protein, 20 aa, Homo sapiens
PPHTHSYTISHATLERIGAV

SEQ ID NO: 3219 - protein, 20 aa, Homo sapiens
FQLQNIVKPLPPVYLTFTRE

SEQ ID NO: 3220 - protein, 20 aa, Homo sapiens
SETETVHLFIPALSVGAIIG

SEQ ID NO: 3221 - protein, 20 aa, Homo sapiens
HEFASLCLANMSAEYTSKVQ

SEQ ID NO: 3222 - protein, 20 aa, Homo sapiens
GTYPFCTYYFVLSIIVPDKT

SEQ ID NO: 3223 - protein, 20 aa, Homo sapiens
CILESLFRAVITKKVADLVG

SEQ ID NO: 3224 - protein, 20 aa, Homo sapiens
EKVTDLVQFLLFKYQMKEPI

SEQ ID NO: 3225 - protein, 20 aa, Homo sapiens
EVVEVVRIGHLYILVTCLGL

SEQ ID NO: 3226 - protein, 20 aa, Homo sapiens
SRKVAELVHFLLLKYRAREP

SEQ ID NO: 3227 - protein, 20 aa, Homo sapiens
EFLWGPRALAETSYVKVLEH

SEQ ID NO: 3228 - protein, 20 aa, Homo sapiens
GLDTQEEALGLVGVQAATTE

SEQ ID NO: 3229 - protein, 20 aa, Homo sapiens
EALKLKVAELVHFLLHKYRV

SEQ ID NO: 3230 - protein, 20 aa, Homo sapiens
EVNPTTHSYILVSMLGPNDG

SEQ ID NO: 3231 - protein, 20 aa, Homo sapiens
DPDDSYVFVNTLDLTSEGCL

SEQ ID NO: 3232 - protein, 20 aa, Homo sapiens
EKNCEPVVPNAPPAYEKLSA

SEQ ID NO: 3233 - protein, 20 aa, Homo sapiens
IELERKFSHQKYLSAPERAH

SEQ ID NO: 3234 - protein, 20 aa, Homo sapiens
LIEDGYAVTQAELFALLCRL

SEQ ID NO: 3235 - protein, 20 aa, Homo sapiens
LKPLVFRVDETTPAVVQSVL

SEQ ID NO: 3236 - protein, 20 aa, Homo sapiens
NILTIRLTAADHRQLQLSIS

SEQ ID NO: 3237 - protein, 20 aa, Homo sapiens
VDRELRQLRCIDEFSTRCLC

SEQ ID NO: 3238 - protein, 20 aa, Homo sapiens
YDKKIDSLMNAVGCLKSEVK

SEQ ID NO: 3239 - protein, 20 aa, Homo sapiens
DSTPGPAAYMLPMVMGPNTV

SEQ ID NO: 3240 - protein, 20 aa, Homo sapiens
SIPIGWSYFIGWLVLILYFT

SEQ ID NO: 3241 - protein, 20 aa, Homo sapiens
QVTLQLLDGFMITLSTDGVI

SEQ ID NO: 3242 - protein, 20 aa, Homo sapiens
PICNDHYRSVYQKRLMDEAK

SEQ ID NO: 3243 - protein, 20 aa, Homo sapiens
PDHIQRLTYKLCHIYYNWPG

SEQ ID NO: 3244 - protein, 20 aa, Homo sapiens
KYTRPTLQMGMSCLLVFKVI

SEQ ID NO: 3245 - protein, 20 aa, Homo sapiens
LDQLLRHVMNPLETLSITNC

SEQ ID NO: 3246 - protein, 20 aa, Homo sapiens
NCVDDSQDYYVGKKNITCCD

SEQ ID NO: 3247 - protein, 20 aa, Homo sapiens
YELVEKFYDPMFKYHLTVAQ

SEQ ID NO: 3248 - protein, 20 aa, Homo sapiens
SRTDKVLSTAPPQLVHMAAA

SEQ ID NO: 3249 - protein, 20 aa, Homo sapiens
GKKHRYLRLLPEALIRFGGF

SEQ ID NO: 3250 - protein, 20 aa, Homo sapiens
TTGTGVVYPGAITMATTTPS

SEQ ID NO: 3251 - protein, 20 aa, Homo sapiens
AEAAGKYSAAIALLEPAGSE

SEQ ID NO: 3252 - protein, 20 aa, Homo sapiens
NILDSFTVCNSHVLCIASVP

SEQ ID NO: 3253 - protein, 20 aa, Homo sapiens
RLRERKQLVIYEEISDPEED

SEQ ID NO: 3254 - protein, 20 aa, Homo sapiens
PPAWQPFLKDHRISTFKNWP

SEQ ID NO: 3255 - protein, 20 aa, Homo sapiens
QECKERISALNLQIEEEKNK

SEQ ID NO: 3256 - protein, 20 aa, Homo sapiens
REEKCVWKHGITPPLKNVRK

SEQ ID NO: 3257 - protein, 20 aa, Homo sapiens
RLLLRLECNVVIIAHCNLEP

SEQ ID NO: 3258 - protein, 20 aa, Homo sapiens
TSGLELYCQKGLSMTVEADP

SEQ ID NO: 3259 - protein, 20 aa, Homo sapiens
IVHLLLQISDALRYLHFQGF

SEQ ID NO: 3260 - protein, 20 aa, Homo sapiens
TISFFLCQMLYNRRKILQLK

SEQ ID NO: 3261 - protein, 20 aa, Homo sapiens
FYKFFLPTILSLSFFILLVL

SEQ ID NO: 3262 - protein, 20 aa, Homo sapiens
YIPLEYRSISLAIALFFLMD

SEQ ID NO: 3263 - protein, 20 aa, Homo sapiens
FYHKTNIKMRCEFLACWPAF

SEQ ID NO: 3264 - protein, 20 aa, Homo sapiens
TRELCIKLDSSKELLNRQLV

SEQ ID NO: 3265 - protein, 20 aa, Homo sapiens
GEPLVCSMEGTWYLVGLVSW

SEQ ID NO: 3266 - protein, 20 aa, Homo sapiens
LDRRGAVIQSVPGFWANVIA

SEQ ID NO: 3267 - protein, 20 aa, Homo sapiens
LCGAQYRIHTHGVFRGIQDV

SEQ ID NO: 3268 - protein, 20 aa, Homo sapiens
MRCHAHGPSCLVTAITREEG

SEQ ID NO: 3269 - protein, 20 aa, Homo sapiens
YVRNLFLTGNQLAVLPAGAF

SEQ ID NO: 3270 - protein, 20 aa, Homo sapiens
NPGSLLQLPHTEALLVLCYS

SEQ ID NO: 3271 - protein, 20 aa, Homo sapiens
QLQMSLYASGLLTGVVVDSG

SEQ ID NO: 3272 - protein, 20 aa, Homo sapiens
DRKVICFVDVSTLNVEDKDY

SEQ ID NO: 3273 - protein, 20 aa, Homo sapiens
EPLSNAVKRNVPRCIIILVL

SEQ ID NO: 3274 - protein, 20 aa, Homo sapiens
ISISSLRQFETVCKFHWVEA

SEQ ID NO: 3275 - protein, 20 aa, Homo sapiens
THLYTLILRPDLSYDVKIDG

SEQ ID NO: 3276 - protein, 20 aa, Homo sapiens
SSAIQSWYDEILDFVYGVGP

SEQ ID NO: 3277 - protein, 20 aa, Homo sapiens
HILIENRQLSRLMVGPHAAA

SEQ ID NO: 3278 - protein, 20 aa, Homo sapiens
LIVLVLCSAFLLLWQGEGVN

SEQ ID NO: 3279 - protein, 20 aa, Homo sapiens
IGCVTSINEDNIYISNSIYF

SEQ ID NO: 3280 - protein, 20 aa, Homo sapiens
NPNSLAIYRLPTLDPVCVGD

SEQ ID NO: 3281 - protein, 20 aa, Homo sapiens
VSVEAFLMQASGVRWCVVHG

SEQ ID NO: 3282 - protein, 20 aa, Homo sapiens
NTVICSKLAAKCLVMKAEMN

SEQ ID NO: 3283 - protein, 20 aa, Homo sapiens
VCRKWNQMMYSAELWRYRTI

SEQ ID NO: 3284 - protein, 20 aa, Homo sapiens
RNRRSHRAMRVAHLELATYE

SEQ ID NO: 3285 - protein, 20 aa, Homo sapiens
NKHHEIFNLLSFTLNPLEGK

SEQ ID NO: 3286 - protein, 20 aa, Homo sapiens
ACGLYHKMNGQNRPLIKPKR

SEQ ID NO: 3287 - protein, 20 aa, Homo sapiens
VNGMYRIYDMENVLLGLFST

SEQ ID NO: 3288 - protein, 20 aa, Homo sapiens
LSIGTGRAMLGTHTMEVTVY

SEQ ID NO: 3289 - protein, 20 aa, Homo sapiens
TEEEKWSHMQTFLQSMSSTD

SEQ ID NO: 3290 - protein, 20 aa, Homo sapiens
AILELLKYHQRVLYIDIDIH

SEQ ID NO: 3291 - protein, 20 aa, Homo sapiens
ALSSGLYQCVASNAIGTSTC

SEQ ID NO: 3292 - protein, 20 aa, Homo sapiens
NIPPHLQWEVLDSLLVQYGV

SEQ ID NO: 3293 - protein, 20 aa, Homo sapiens
PCGARRPDSRLLQLHITMPF

SEQ ID NO: 3294 - protein, 20 aa, Homo sapiens
IPAIVHYSPDCKILVVSNPV

SEQ ID NO: 3295 - protein, 20 aa, Homo sapiens
YEKKLVQLLVSPPCAPPVMN

SEQ ID NO: 3296 - protein, 20 aa, Homo sapiens
AVITKKVADLVGFLLLKYRA

SEQ ID NO: 3297 - protein, 20 aa, Homo sapiens
LGSVIRNFQDFFPVIFSKAS

SEQ ID NO: 3298 - protein, 20 aa, Homo sapiens
GIEVVEVVPISHLYILVTCL

SEQ ID NO: 3299 - protein, 20 aa, Homo sapiens
ASNTYTLVTCLGLSYDGLLG

SEQ ID NO: 3300 - protein, 20 aa, Homo sapiens
AGSPGPLKSPQGASAIPTAI

SEQ ID NO: 3301 - protein, 20 aa, Homo sapiens
DPIGHVYIFATCLGLSYDGL

SEQ ID NO: 3302 - protein, 20 aa, Homo sapiens
KVINYLVMLNAREPICYPSL

SEQ ID NO: 3303 - protein, 20 aa, Homo sapiens
PQRAPTTAAAAAAGVSSTKS

SEQ ID NO: 3304 - protein, 20 aa, Homo sapiens
FLGLLGIYDGILHSIYGDAR

SEQ ID NO: 3305 - protein, 20 aa, Homo sapiens
LKRAREFMELLFGLALIEVG

SEQ ID NO: 3306 - protein, 20 aa, Homo sapiens
TTAEEAAGIGILTVILGVLL

SEQ ID NO: 3307 - protein, 20 aa, Homo sapiens
LRLDFIHANSTTHSFLFGAL

SEQ ID NO: 3308 - protein, 20 aa, Homo sapiens
SEGCVHILDSQTVVLKEPQC

SEQ ID NO: 3309 - protein, 20 aa, Homo sapiens
ELLFRQIAWIKKLPFFCELS

SEQ ID NO: 3310 - protein, 20 aa, Homo sapiens
KHLKHMRRMYGTSLYQFIPL

SEQ ID NO: 3311 - protein, 20 aa, Homo sapiens
LSISSCLQQLSLLMWITQCF

SEQ ID NO: 3312 - protein, 20 aa, Homo sapiens
ERENRYDCLGSKKYSYMNIC

SEQ ID NO: 3313 - protein, 20 aa, Homo sapiens
KHTPTKLRAPAYSFRGAPML

SEQ ID NO: 3314 - protein, 20 aa, Homo sapiens
TDGVIICVAENISSLLGHLP

SEQ ID NO: 3315 - protein, 20 aa, Homo sapiens
SEKKKSVLCSTPTINIPASP

SEQ ID NO: 3316 - protein, 20 aa, Homo sapiens
YAASIRRTDGGLFLLADVSH

SEQ ID NO: 3317 - protein, 20 aa, Homo sapiens
MKVFKFIGLMILLTSAFSAG

SEQ ID NO: 3318 - protein, 20 aa, Homo sapiens
LSLQCLQALYVDSLFFLRGR

SEQ ID NO: 3319 - protein, 20 aa, Homo sapiens
PRSWLLLCPLSHVLFRAILY

SEQ ID NO: 3320 - protein, 20 aa, Homo sapiens
NITCCDTDLCNASGAHALQP

SEQ ID NO: 3321 - protein, 20 aa, Homo sapiens
LSPQCLSLLHAMVAYDPDER

SEQ ID NO: 3322 - protein, 20 aa, Homo sapiens
AAGISSTITRDLYVTATHSV

SEQ ID NO: 3323 - protein, 20 aa, Homo sapiens
TREPAAEIEALLGMDLVRLG

SEQ ID NO: 3324 - protein, 20 aa, Homo sapiens
IAECTSMIGYALGYVLGAPL

SEQ ID NO: 3325 - protein, 20 aa, Homo sapiens
EIADDLSILYSNRAACYLKE

SEQ ID NO: 3326 - protein, 20 aa, Homo sapiens
GVWVSIRLDSTLRLYHAHTY

SEQ ID NO: 3327 - protein, 20 aa, Homo sapiens
INMISGVLQRYCRFGSRPLQ

SEQ ID NO: 3328 - protein, 20 aa, Homo sapiens
KLNYEVMTKLGFKVTLPPFM

SEQ ID NO: 3329 - protein, 20 aa, Homo sapiens
FLEGCACTPERMAEAGFIHC

SEQ ID NO: 3330 - protein, 20 aa, Homo sapiens
QSGRKLAELQASLSKYCDQL

SEQ ID NO: 3331 - protein, 20 aa, Homo sapiens
ILLVLGASLLTSGLELYCQK

SEQ ID NO: 3332 - protein, 20 aa, Homo sapiens
LHFQGFIHRSLSSYAVHIIS

SEQ ID NO: 3333 - protein, 20 aa, Homo sapiens
FELYPEFLLVFKEAFHDISH

SEQ ID NO: 3334 - protein, 20 aa, Homo sapiens
LAIALFFLMDVLLRVFVERR

SEQ ID NO: 3335 - protein, 20 aa, Homo sapiens
LLKEHLCLAENKMAIQSRDV

SEQ ID NO: 3336 - protein, 20 aa, Homo sapiens
FRSNPYFQNKVITKEYLVNI

SEQ ID NO: 3337 - protein, 20 aa, Homo sapiens
EQASRIWSWLLGAAMVGAVL

SEQ ID NO: 3338 - protein, 20 aa, Homo sapiens
ALPVSGAAQWAPVLDFAPPG

SEQ ID NO: 3339 - protein, 20 aa, Homo sapiens
EEGGPRSGGAQAKLGCCWGY

SEQ ID NO: 3340 - protein, 20 aa, Homo sapiens
LVPDGAVCSNLPYASWFESF

SEQ ID NO: 3341 - protein, 20 aa, Homo sapiens
YAGGVVLHPRTISLESLAVI

SEQ ID NO: 3342 - protein, 20 aa, Homo sapiens
MCTPHRSCAIVTFMNKTLGT

SEQ ID NO: 3343 - protein, 20 aa, Homo sapiens
DKLVESVMKLCLIMAKYSND

SEQ ID NO: 3344 - protein, 20 aa, Homo sapiens
LEPEDGTALDVHFVSTLEPL

SEQ ID NO: 3345 - protein, 20 aa, Homo sapiens
FAADVRLMFMNCYKYNPPDH

SEQ ID NO: 3346 - protein, 20 aa, Homo sapiens
SGIINFIHFREACRETYMEF

SEQ ID NO: 3347 - protein, 20 aa, Homo sapiens
RCGENLYMSSDPTSWSSAIQ

SEQ ID NO: 3348 - protein, 20 aa, Homo sapiens
NESSMLSTDTKKASILLIRK

SEQ ID NO: 3349 - protein, 20 aa, Homo sapiens
ANFDLAVVARRYPASGIHFV

SEQ ID NO: 3350 - protein, 20 aa, Homo sapiens
YIDQFLLTSFPTFTSVGVLI

SEQ ID NO: 3351 - protein, 20 aa, Homo sapiens
FAMRNVYLPRGFLPYRPPRP

SEQ ID NO: 3352 - protein, 20 aa, Homo sapiens
PKYQCPHCATIIARKSDLRV

SEQ ID NO: 3353 - protein, 20 aa, Homo sapiens
VVLTVKASYVASTKYQKVYG

SEQ ID NO: 3354 - protein, 20 aa, Homo sapiens
PQVDDIVNVVMVESIQFCFI

SEQ ID NO: 3355 - protein, 20 aa, Homo sapiens
LGTVKWFNVRNGYGFINRND

SEQ ID NO: 3356 - protein, 20 aa, Homo sapiens
SGIRSVSFYEHIITVGTGQG

SEQ ID NO: 3357 - protein, 20 aa, Homo sapiens
KNMENRHAMSSQYRMHSYYP

SEQ ID NO: 3358 - protein, 20 aa, Homo sapiens
TKGWVRLQFHAGQAWVPTTH

SEQ ID NO: 3359 - protein, 20 aa, Homo sapiens
LAAATATFAAAQEECVCENY

SEQ ID NO: 3360 - protein, 20 aa, Homo sapiens
VSGLVTSRSFRTASVSINQT

SEQ ID NO: 3361 - protein, 20 aa, Homo sapiens
EPPPVSFQPYHPLHFRGSNG

SEQ ID NO: 3362 - protein, 20 aa, Homo sapiens
GQSLEEDSALEALLNFFFPT

SEQ ID NO: 3363 - protein, 20 aa, Homo sapiens
CILKQKSIIKLSSERKKEDI

SEQ ID NO: 3364 - protein, 20 aa, Homo sapiens
GWTPLMYAASVANAELVRVL

SEQ ID NO: 3365 - protein, 20 aa, Homo sapiens
DCVLYRYGSFSVTLDIVQGI

SEQ ID NO: 3366 - protein, 20 aa, Homo sapiens
HEELPLCFALKSHFVGAVIG

SEQ ID NO: 3367 - protein, 20 aa, Homo sapiens
GILELLKYHPRVLYIDIDIH

SEQ ID NO: 3368 - protein, 20 aa, Homo sapiens
VGFTGTMPATNVSIFINNTQ

SEQ ID NO: 3369 - protein, 20 aa, Homo sapiens
LPPVYLTFTRESSCEIKLKW

SEQ ID NO: 3370 - protein, 20 aa, Homo sapiens
VDILTYIVWKISGLPVTRVI

SEQ ID NO: 3371 - protein, 20 aa, Homo sapiens
DHFPLLFSEASECMLLVFGI

SEQ ID NO: 3372 - protein, 20 aa, Homo sapiens
EYLQLVFGIEVVEVVRIGHL

SEQ ID NO: 3373 - protein, 20 aa, Homo sapiens
GPRALIETSYVKVLHHTLKI

SEQ ID NO: 3374 - protein, 20 aa, Homo sapiens
SSSSPLVPGTLGEVPAAGSP

SEQ ID NO: 3375 - protein, 20 aa, Homo sapiens
RALIETSYVKVLHHMVKISG

SEQ ID NO: 3376 - protein, 20 aa, Homo sapiens
AGHSYILVTCLGLSYDGLLG

SEQ ID NO: 3377 - protein, 20 aa, Homo sapiens
WGPRAYAETTKMKVLEFLAK

SEQ ID NO: 3378 - protein, 20 aa, Homo sapiens
TDEESLLSSWDFPRRKLLMP

SEQ ID NO: 3379 - protein, 20 aa, Homo sapiens
SDPPCYEFLWGPRAYAETTK

SEQ ID NO: 3380 - protein, 20 aa, Homo sapiens
IGILTVILGVLLLIGCWYCR

SEQ ID NO: 3381 - protein, 20 aa, Homo sapiens
EESLSEVVVPMPSWLIRTRE

SEQ ID NO: 3382 - protein, 20 aa, Homo sapiens
NISQCYLAYDETLNVLKFSA

SEQ ID NO: 3383 - protein, 20 aa, Homo sapiens
SSLRKLCFSVQNVFKKEDEH

SEQ ID NO: 3384 - protein, 20 aa, Homo sapiens
QDNEWNYTRAGQAFTMLQTE

SEQ ID NO: 3385 - protein, 20 aa, Homo sapiens
HEEVVTFLVDRKCQLDVLDG

SEQ ID NO: 3386 - protein, 20 aa, Homo sapiens
CGARGPESRLLEFYLAMPFA

SEQ ID NO: 3387 - protein, 20 aa, Homo sapiens
LASSCCSSNILGSVNVCGFE

SEQ ID NO: 3388 - protein, 20 aa, Homo sapiens
DKMVCYLLKTKAIVNASEMD

SEQ ID NO: 3389 - protein, 20 aa, Homo sapiens
PEVNPLYRADPVDLEFSVDQ

SEQ ID NO: 3390 - protein, 20 aa, Homo sapiens
DKADIFAFGLTLWEMMTLSI

SEQ ID NO: 3391 - protein, 20 aa, Homo sapiens
GLKPDHMQRLTFKLCHLYYN

SEQ ID NO: 3392 - protein, 20 aa, Homo sapiens
VTECGIRAKAVSQDMVIYST

SEQ ID NO: 3393 - protein, 20 aa, Homo sapiens
EVGEFPWQVSIQARSEPFCG

SEQ ID NO: 3394 - protein, 20 aa, Homo sapiens
LHEVVFDRKSGSLALICELM

SEQ ID NO: 3395 - protein, 20 aa, Homo sapiens
VFSFLKRLICRSGRGRKLSG

SEQ ID NO: 3396 - protein, 20 aa, Homo sapiens
SLEKHKLFISGLPFSCTKEE

SEQ ID NO: 3397 - protein, 20 aa, Homo sapiens
AEGSKAMNGSAAKLQQYYCW

SEQ ID NO: 3398 - protein, 20 aa, Homo sapiens
MTFGRLHRIIPKIMPKKPAE

SEQ ID NO: 3399 - protein, 20 aa, Homo sapiens
TENEPDLAQCFFCFKELEGW

SEQ ID NO: 3400 - protein, 20 aa, Homo sapiens
ACTVRNLARSQSVKMKDKLK

SEQ ID NO: 3401 - protein, 20 aa, Homo sapiens
SIKARFPAETYALVGQQVTL

SEQ ID NO: 3402 - protein, 20 aa, Homo sapiens
PLVSRDPPASASLFQDTCAG

SEQ ID NO: 3403 - protein, 20 aa, Homo sapiens
AVGPMFVREACPHQLLTQPR

SEQ ID NO: 3404 - protein, 20 aa, Homo sapiens
VGPPSLNYIPPVLQLSGGQK

SEQ ID NO: 3405 - protein, 20 aa, Homo sapiens
KAQMEKIGLPIILHLFALST

SEQ ID NO: 3406 - protein, 20 aa, Homo sapiens
YFWLHTSFIENNRLYLPKNE

SEQ ID NO: 3407 - protein, 20 aa, Homo sapiens
EAPPIYLQVSSYQHWIWDCL

SEQ ID NO: 3408 - protein, 20 aa, Homo sapiens
TLAKHTISSDYVIPIGTYGQ

SEQ ID NO: 3409 - protein, 20 aa, Homo sapiens
WAPVLDFAPPGASAYGSLGG

SEQ ID NO: 3410 - protein, 20 aa, Homo sapiens
GGAQAKLGCCWGYPSPRSTW

SEQ ID NO: 3411 - protein, 20 aa, Homo sapiens
LKQELCRQLFRQFCYQDSPG

SEQ ID NO: 3412 - protein, 20 aa, Homo sapiens
PAGAFARRPPLAELAALNLS

SEQ ID NO: 3413 - protein, 20 aa, Homo sapiens
FKSQQCLMRNRNRKVSRMRC

SEQ ID NO: 3414 - protein, 20 aa, Homo sapiens
SVESCEISLRPLLVSHVMAC

SEQ ID NO: 3415 - protein, 20 aa, Homo sapiens
EELQKYIQESQALAKRSCGL

SEQ ID NO: 3416 - protein, 20 aa, Homo sapiens
AVSPEFAYVPADPAQLAAQM

SEQ ID NO: 3417 - protein, 20 aa, Homo sapiens
ECADQRLAISHSQIAHLEER

SEQ ID NO: 3418 - protein, 20 aa, Homo sapiens
REKLKSQEIFLNLKTALEKY

SEQ ID NO: 3419 - protein, 20 aa, Homo sapiens
QLVWYSTYQVGCGIAYCPNQ

SEQ ID NO: 3420 - protein, 20 aa, Homo sapiens
KRKLVKELRCVGQKYEKIFE

SEQ ID NO: 3421 - protein, 20 aa, Homo sapiens
NKISTEHQSLVLVKRLLAVS

SEQ ID NO: 3422 - protein, 20 aa, Homo sapiens
YLPRGFLPYRPPRPAFFPPA

SEQ ID NO: 3423 - protein, 20 aa, Homo sapiens
LPQGDTQLTTVQGVVTSFCG

SEQ ID NO: 3424 - protein, 20 aa, Homo sapiens
PPARSQADKPVLAIQVLGTV

SEQ ID NO: 3425 - protein, 20 aa, Homo sapiens
AENTLSKLLSTKLPYCRENV

SEQ ID NO: 3426 - protein, 20 aa, Homo sapiens
PYYNNLYNCPQYSMALAADS

SEQ ID NO: 3427 - protein, 20 aa, Homo sapiens
KALNSCSIPVSVEAFLMQAS

SEQ ID NO: 3428 - protein, 20 aa, Homo sapiens
ALLSVRVYYKKCPELLQGLA

SEQ ID NO: 3429 - protein, 20 aa, Homo sapiens
CQILDSLSYMRNENVISELN

SEQ ID NO: 3430 - protein, 20 aa, Homo sapiens
CYYLSYYLCSGSSYFVLANG

SEQ ID NO: 3431 - protein, 20 aa, Homo sapiens
KYDTNCDAAINSHITLELYT

SEQ ID NO: 3432 - protein, 20 aa, Homo sapiens
NGYTALTWAARQGHKNIVLK

SEQ ID NO: 3433 - protein, 20 aa, Homo sapiens
HVPPYYGNSVRATVQRYPPT

SEQ ID NO: 3434 - protein, 20 aa, Homo sapiens
RCLLHLAVIGALLAVGATKV

SEQ ID NO: 3435 - protein, 20 aa, Homo sapiens
KCVEVVKTFNLPLLMLGGGG

SEQ ID NO: 3436 - protein, 20 aa, Homo sapiens
INQVVDFYQPTCIVLQCGAD

SEQ ID NO: 3437 - protein, 20 aa, Homo sapiens
SKKTLLRFWLPFGFILILVI

SEQ ID NO: 3438 - protein, 20 aa, Homo sapiens
DLLHQLVTIMNPNTLMTHEV

SEQ ID NO: 3439 - protein, 20 aa, Homo sapiens
EAHIRVPSFAAGRVIGKGGK

SEQ ID NO: 3440 - protein, 20 aa, Homo sapiens
IIKLKGYTSWAIGLSVMDLV

SEQ ID NO: 3441 - protein, 20 aa, Homo sapiens
TTKRKAVDTYCLDYKPSKGR

SEQ ID NO: 3442 - protein, 20 aa, Homo sapiens
FIKCNHQRAVHLFMASLETN

SEQ ID NO: 3443 - protein, 20 aa, Homo sapiens
EEALEAQQEALGLVCVQAAT

SEQ ID NO: 3444 - protein, 20 aa, Homo sapiens
GPITQIFPTVRPADLTRVIM

SEQ ID NO: 3445 - protein, 20 aa, Homo sapiens
ALVETSYVKVLHHLLKISGG

SEQ ID NO: 3446 - protein, 20 aa, Homo sapiens
EYLQLVFGIEVVEVVPISHL

SEQ ID NO: 3447 - protein, 20 aa, Homo sapiens
LERVIKNYKRCFPVIFGKAS

SEQ ID NO: 3448 - protein, 20 aa, Homo sapiens
APEEVIWEALSVMGVYVGKE

SEQ ID NO: 3449 - protein, 20 aa, Homo sapiens
PITKAEMLTNVISRYTGYFP

SEQ ID NO: 3450 - protein, 20 aa, Homo sapiens
MPREDAHFIYGYPKKGHGHS

SEQ ID NO: 3451 - protein, 20 aa, Homo sapiens
IEDSEMSRVIRVSELSLCDL

SEQ ID NO: 3452 - protein, 20 aa, Homo sapiens
CFPKLLRLDGRELSAPVIVD

SEQ ID NO: 3453 - protein, 20 aa, Homo sapiens
SEIVGMLLQQNVDVFAADIC

SEQ ID NO: 3454 - protein, 20 aa, Homo sapiens
CIDEFSTRCLCDLYMHPYCC

SEQ ID NO: 3455 - protein, 20 aa, Homo sapiens
IWIFELERNVSIPIGWSYFI

SEQ ID NO: 3456 - protein, 20 aa, Homo sapiens
ERCAVFQCAQCHAVLADSVH

SEQ ID NO: 3457 - protein, 20 aa, Homo sapiens
AVYVEPAAAAAAAAISDDQI

SEQ ID NO: 3458 - protein, 20 aa, Homo sapiens
DFDDEAYYAALGTRPPINME

SEQ ID NO: 3459 - protein, 20 aa, Homo sapiens
KKAIQLYRHGTSLEIWLGYV

SEQ ID NO: 3460 - protein, 20 aa, Homo sapiens
TRNEWYDFYLISQVACRGTV

SEQ ID NO: 3461 - protein, 20 aa, Homo sapiens
LLTSAFSAGSGQSPMTVLCS

SEQ ID NO: 3462 - protein, 20 aa, Homo sapiens
LLKDEALAIAALELLPRELF

SEQ ID NO: 3463 - protein, 20 aa, Homo sapiens
ECGDRSIFEGRTRYSRITGG

SEQ ID NO: 3464 - protein, 20 aa, Homo sapiens
YPANEYAYRRGIAEAVGLPS

SEQ ID NO: 3465 - protein, 20 aa, Homo sapiens
QPYTEYISTRWYRAPECLLT

SEQ ID NO: 3466 - protein, 20 aa, Homo sapiens
PPQLVHMAAAGIPSMSTRDL

SEQ ID NO: 3467 - protein, 20 aa, Homo sapiens
RRKVLSRAVAAATYKTMGPA

SEQ ID NO: 3468 - protein, 20 aa, Homo sapiens
AAPPSYCFVAFPPRAKDGLV

SEQ ID NO: 3469 - protein, 20 aa, Homo sapiens
LCTIIFTTIAFFIYKRRLNE

SEQ ID NO: 3470 - protein, 20 aa, Homo sapiens
YAAQLASMQVSPGAKMPSTP

SEQ ID NO: 3471 - protein, 20 aa, Homo sapiens
CEKHLQALAPESRALRKDKP

SEQ ID NO: 3472 - protein, 20 aa, Homo sapiens
TFIPYCSMAHAQLCFHGHRD

SEQ ID NO: 3473 - protein, 20 aa, Homo sapiens
PPGKPTTSEKINMISGVLQR

SEQ ID NO: 3474 - protein, 20 aa, Homo sapiens
FHMPERLAKEICALDSSKEQ

SEQ ID NO: 3475 - protein, 20 aa, Homo sapiens
TLPLCRVQPITSSHLALPFQ

SEQ ID NO: 3476 - protein, 20 aa, Homo sapiens
SSPPGLIVTSYSNYCEDSFC

SEQ ID NO: 3477 - protein, 20 aa, Homo sapiens
CKMSLHFCLCWPSVYWTERF

SEQ ID NO: 3478 - protein, 20 aa, Homo sapiens
FLLVFKEAFHDISHCLKAQM

SEQ ID NO: 3479 - protein, 20 aa, Homo sapiens
DRTGTMVCAFLIASEICSTA

SEQ ID NO: 3480 - protein, 20 aa, Homo sapiens
HCLIWRDVIYSVRVGSPWID

SEQ ID NO: 3481 - protein, 20 aa, Homo sapiens
DSCTGSQALLLRTPYSSDNL

SEQ ID NO: 3482 - protein, 20 aa, Homo sapiens
LASNHFLYLPRDVLAQLPSL

SEQ ID NO: 3483 - protein, 20 aa, Homo sapiens
RKPAAGFLPSLLKVLLLPLA

SEQ ID NO: 3484 - protein, 20 aa, Homo sapiens
ENPGPSYARRRVSLGIDICH

SEQ ID NO: 3485 - protein, 20 aa, Homo sapiens
LTNAIFVSFNITIILSSLEL

SEQ ID NO: 3486 - protein, 20 aa, Homo sapiens
ILQINDFAYEIKPLAFSTTF

SEQ ID NO: 3487 - protein, 20 aa, Homo sapiens
ENCYSVYADQVNIDYLMNRP

SEQ ID NO: 3488 - protein, 20 aa, Homo sapiens
VSNLSQGVMLSHSPICMETT

SEQ ID NO: 3489 - protein, 20 aa, Homo sapiens
AIGLELWQVRSGTIFDNFLI

SEQ ID NO: 3490 - protein, 20 aa, Homo sapiens
TKKASILLIRKIYILMQNLG

SEQ ID NO: 3491 - protein, 20 aa, Homo sapiens
QLSRLMVGPHAAARNLWGNL

SEQ ID NO: 3492 - protein, 20 aa, Homo sapiens
ELYQENEMKLYRKLIVEEKC

SEQ ID NO: 3493 - protein, 20 aa, Homo sapiens
PPPAPFAMRNVYPPRGFPPY

SEQ ID NO: 3494 - protein, 20 aa, Homo sapiens
ACKQDLLAYLQRIALYCHQL

SEQ ID NO: 3495 - protein, 20 aa, Homo sapiens
GPSDSGTRVLIGCVTSINED

SEQ ID NO: 3496 - protein, 20 aa, Homo sapiens
SGQRPRRWCPPPFFYRRRFV

SEQ ID NO: 3497 - protein, 20 aa, Homo sapiens
DSSGTKLFVAGGPLPSGLHG

SEQ ID NO: 3498 - protein, 20 aa, Homo sapiens
YPPPSYLGQSVPQFFTFEDA

SEQ ID NO: 3499 - protein, 20 aa, Homo sapiens
LASWARIAARAVQPKALNSC

SEQ ID NO: 3500 - protein, 20 aa, Homo sapiens
EKAPEFSMQGLKAGVIAVIV

SEQ ID NO: 3501 - protein, 20 aa, Homo sapiens
SCKETFNLYYAESDLDYGTN

SEQ ID NO: 3502 - protein, 20 aa, Homo sapiens
LRHKCCFSSSGTTSFKCFAP

SEQ ID NO: 3503 - protein, 20 aa, Homo sapiens
AQKLMRLQNLRGGHICLHDI

SEQ ID NO: 3504 - protein, 20 aa, Homo sapiens
TTYPPYVPEYSSGLFPPSSL

SEQ ID NO: 3505 - protein, 20 aa, Homo sapiens
DDMVNELFDSLFPVIYTQLM

SEQ ID NO: 3506 - protein, 20 aa, Homo sapiens
CLNVSLADTNSLAVVSTQLI

SEQ ID NO: 3507 - protein, 20 aa, Homo sapiens
KYHSDDYIKFLRSIRPDNMS

SEQ ID NO: 3508 - protein, 20 aa, Homo sapiens
SYKHLFQPVINQVVDFYQPT

SEQ ID NO: 3509 - protein, 20 aa, Homo sapiens
ISHATLERIGAVPVMVPAQS

SEQ ID NO: 3510 - protein, 20 aa, Homo sapiens
PQDFEIVDPGYLGYLYLQWQ

SEQ ID NO: 3511 - protein, 20 aa, Homo sapiens
MNPNTLMTHEVPVYRTNQCA

SEQ ID NO: 3512 - protein, 20 aa, Homo sapiens
MYVIDLMFHPGGLMKLRSRE

SEQ ID NO: 3513 - protein, 20 aa, Homo sapiens
ISSIGLTYFQSSNLQCSTCT

SEQ ID NO: 3514 - protein, 20 aa, Homo sapiens
TGHSYVLVTCLGLSYDGLLG

SEQ ID NO: 3515 - protein, 20 aa, Homo sapiens
AQDRIATTDDTTAMASASSS

SEQ ID NO: 3516 - protein, 20 aa, Homo sapiens
EVLSIMGVYAGREHFLFGEP

SEQ ID NO: 3517 - protein, 20 aa, Homo sapiens
MAELVHFLLLKYRAREPFTK

SEQ ID NO: 3518 - protein, 20 aa, Homo sapiens
SVLRNCQDFFPVIFSKASEY

SEQ ID NO: 3519 - protein, 20 aa, Homo sapiens
ALVETSYVKVLHHMVKISGG

SEQ ID NO: 3520 - protein, 20 aa, Homo sapiens
SGGPRISYPLLHEWALREGE

SEQ ID NO: 3521 - protein, 20 aa, Homo sapiens
MLGDGHSMPKAALLIIVLGV

SEQ ID NO: 3522 - protein, 20 aa, Homo sapiens
RNGLLMPLLGVIFLKGNSAT

SEQ ID NO: 3523 - protein, 20 aa, Homo sapiens
SVTKGEMLKIVGKRFREHFP

SEQ ID NO: 3524 - protein, 20 aa, Homo sapiens
FLNMLGIYDGKRHLIFGEPR

SEQ ID NO: 3525 - protein, 20 aa, Homo sapiens
IITEDLVQDKYVVYRQVCNS

SEQ ID NO: 3526 - protein, 20 aa, Homo sapiens
PVTEAEMLMIVIKYKDYFPV

SEQ ID NO: 3527 - protein, 20 aa, Homo sapiens
KLKMCFNQIQNTYMVQYEKK

SEQ ID NO: 3528 - protein, 20 aa, Homo sapiens
SDVPFPFSAQSGAGVPGWGI

SEQ ID NO: 3529 - protein, 20 aa, Homo sapiens
PLCSTFSDQSAYVSAIRDCF

SEQ ID NO: 3530 - protein, 20 aa, Homo sapiens
VLVKRKLVHDIIDLIYLNGL

SEQ ID NO: 3531 - protein, 20 aa, Homo sapiens
SLLMWITQCFLPVFLAQPPS

SEQ ID NO: 3532 - protein, 20 aa, Homo sapiens
PYPYCLCYSKRSRSCGLCDL

SEQ ID NO: 3533 - protein, 20 aa, Homo sapiens
VVTFGIKHSDYMTPLLVDVE

SEQ ID NO: 3534 - protein, 20 aa, Homo sapiens
FTCAILCYFNHKSFWSLILS

SEQ ID NO: 3535 - protein, 20 aa, Homo sapiens
VVLEAPFLVGIEGSLKGSTY

SEQ ID NO: 3536 - protein, 20 aa, Homo sapiens
EELDESYQKVIELFSVCTNE

SEQ ID NO: 3537 - protein, 20 aa, Homo sapiens
TDGGLFLLADVSHKVIRNDC

SEQ ID NO: 3538 - protein, 20 aa, Homo sapiens
WPGFAISVSYFERKLLFSAD

SEQ ID NO: 3539 - protein, 20 aa, Homo sapiens
NNDVCVHFHELHLGLGCPPN

SEQ ID NO: 3540 - protein, 20 aa, Homo sapiens
SPYLGQMINLRRLLLSHIHA

SEQ ID NO: 3541 - protein, 20 aa, Homo sapiens
GEVKRQIYVAAFTVQAAAET

SEQ ID NO: 3542 - protein, 20 aa, Homo sapiens
DMNIYELIRGRRYPLSEKKI

SEQ ID NO: 3543 - protein, 20 aa, Homo sapiens
PTPDNVLSAVTPELINLAGA

SEQ ID NO: 3544 - protein, 20 aa, Homo sapiens
VECTYISIDQVPRTYAIMIS

SEQ ID NO: 3545 - protein, 20 aa, Homo sapiens
LCAALWILMKNPVLICLALS

SEQ ID NO: 3546 - protein, 20 aa, Homo sapiens
DQRTLAAAAAAQQGFLFPPG

SEQ ID NO: 3547 - protein, 20 aa, Homo sapiens
IFYVYMKRKYEAMTKLGFKA

SEQ ID NO: 3548 - protein, 20 aa, Homo sapiens
DLPCVIESLRTLDKKTFYKT

SEQ ID NO: 3549 - protein, 20 aa, Homo sapiens
VTLECFAFGNPVPRIKWRKV

SEQ ID NO: 3550 - protein, 20 aa, Homo sapiens
LVMTKCRLEHELAIKANTLC

SEQ ID NO: 3551 - protein, 20 aa, Homo sapiens
MGTPRIQHLLILLVLGASLL

SEQ ID NO: 3552 - protein, 20 aa, Homo sapiens
PKPHVSDHNRLLHLARPKAQ

SEQ ID NO: 3553 - protein, 20 aa, Homo sapiens
VFKEAFHDISHCLKAQMEKI

SEQ ID NO: 3554 - protein, 20 aa, Homo sapiens
QYFSDLFNILDTAIIVILLL

SEQ ID NO: 3555 - protein, 20 aa, Homo sapiens
HREKFCYELTGEPLVCSMEG

SEQ ID NO: 3556 - protein, 20 aa, Homo sapiens
PEKDKFFAYLTLAKHTISSD

SEQ ID NO: 3557 - protein, 20 aa, Homo sapiens
PYSSDNLYQMTSQLECMTWN

SEQ ID NO: 3558 - protein, 20 aa, Homo sapiens
EIHTKEQILELLVLEQFLTI

SEQ ID NO: 3559 - protein, 20 aa, Homo sapiens
VLCSQPVSILSPNTLKEIEA

SEQ ID NO: 3560 - protein, 20 aa, Homo sapiens
GSNRNFSVWLGASVVAHLST

SEQ ID NO: 3561 - protein, 20 aa, Homo sapiens
HHCHCNYLWDPPNCLIKGYG

SEQ ID NO: 3562 - protein, 20 aa, Homo sapiens
DEKQWHDVSVYLGLTNCPSS

SEQ ID NO: 3563 - protein, 20 aa, Homo sapiens
SADKMQQLNAAHQEALMKLE

SEQ ID NO: 3564 - protein, 20 aa, Homo sapiens
ARCMRRDFVKHLKKKLKRMI

SEQ ID NO: 3565 - protein, 20 aa, Homo sapiens
CAYGTRYLDDLCVKILREDK

SEQ ID NO: 3566 - protein, 20 aa, Homo sapiens
GAGAAARAGEGLGLIQEAAS

SEQ ID NO: 3567 - protein, 20 aa, Homo sapiens
CEKLNRFNSELVHEILCLEK

SEQ ID NO: 3568 - protein, 20 aa, Homo sapiens
LEERLESIISGAALMADSSC

SEQ ID NO: 3569 - protein, 20 aa, Homo sapiens
ESIQFCFIWRAISITPVHKS

SEQ ID NO: 3570 - protein, 20 aa, Homo sapiens
RPPSVAPPPMVAEIPSAGTG

SEQ ID NO: 3571 - protein, 20 aa, Homo sapiens
KATDSFHTELHPRVAFWIIK

SEQ ID NO: 3572 - protein, 20 aa, Homo sapiens
SSFYQPSLFPYYNNLYNCPQ

SEQ ID NO: 3573 - protein, 20 aa, Homo sapiens
QKARCKIPALPLPTILPPIN

SEQ ID NO: 3574 - protein, 20 aa, Homo sapiens
IVVVVIAVVAGIVVLVISRK

SEQ ID NO: 3575 - protein, 20 aa, Homo sapiens
QDIGACVALLSVRVYYKKCP

SEQ ID NO: 3576 - protein, 20 aa, Homo sapiens
SYERRQILHLITMMALKVLG

SEQ ID NO: 3577 - protein, 20 aa, Homo sapiens
VSKPFGMLMLSIWILLFVCY

SEQ ID NO: 3578 - protein, 20 aa, Homo sapiens
QVKTIKELGGYVSNLRKICS

SEQ ID NO: 3579 - protein, 20 aa, Homo sapiens
CGHLITAVQNVITELPVNSQ

SEQ ID NO: 3580 - protein, 20 aa, Homo sapiens
QDEKECLKYQVPLPDSMKLE

SEQ ID NO: 3581 - protein, 20 aa, Homo sapiens
GSLGPLLDGTATLRLVKRQV

SEQ ID NO: 3582 - protein, 20 aa, Homo sapiens
GDVGNYYYGQGHPMKPHRIR

SEQ ID NO: 3583 - protein, 20 aa, Homo sapiens
GDIGNYYYGQGHPMKPHRIR

SEQ ID NO: 3584 - protein, 20 aa, Homo sapiens
PDVGNFHYGAGHPMKPHRLA

SEQ ID NO: 3585 - protein, 20 aa, Homo sapiens
MTSQRSPLAPLLLLSLHGVA

SEQ ID NO: 3586 - protein, 20 aa, Homo sapiens
TNYNLFYWYEGLDHALQCVD

SEQ ID NO: 3587 - protein, 20 aa, Homo sapiens
DAFKSDYFNMPVHMVPTELV

SEQ ID NO: 3588 - protein, 20 aa, Homo sapiens
SVPLWSGVNVAGVALKTLDP

SEQ ID NO: 3589 - protein, 20 aa, Homo sapiens
LLGDNQIMPKTGFLIIVLVM

SEQ ID NO: 3590 - protein, 20 aa, Homo sapiens
GILILILSIIFIEGYCTPEE

SEQ ID NO: 3591 - protein, 20 aa, Homo sapiens
HPRKLLMQDLVQENYLEYRQ

SEQ ID NO: 3592 - protein, 20 aa, Homo sapiens
VFGIELMEVDPIGHLYIFAT

SEQ ID NO: 3593 - protein, 20 aa, Homo sapiens
LLGNNQIFPKTGLLIIVLGT

SEQ ID NO: 3594 - protein, 20 aa, Homo sapiens
FGIELMEVDPIGHVYIFATC

SEQ ID NO: 3595 - protein, 20 aa, Homo sapiens
RYFPVIFGKASEFMQVIFGT

SEQ ID NO: 3596 - protein, 20 aa, Homo sapiens
KSGLLMSLLVVIFMNGNCAT

SEQ ID NO: 3597 - protein, 20 aa, Homo sapiens
LQGEEFQSSLQSPVSICSSS

SEQ ID NO: 3598 - protein, 20 aa, Homo sapiens
KHLCYCLYRPRKYLYVTSSF

SEQ ID NO: 3599 - protein, 20 aa, Homo sapiens
LVLVCVLVALAIVYLIALAV

SEQ ID NO: 3600 - protein, 20 aa, Homo sapiens
EVLAGLLTNNKKLTYLNVSC

SEQ ID NO: 3601 - protein, 20 aa, Homo sapiens
DMYIVQKYISNPLLIGRYKC

SEQ ID NO: 3602 - protein, 20 aa, Homo sapiens
DHRQLQLSISSCLQQLSLLM

SEQ ID NO: 3603 - protein, 20 aa, Homo sapiens
DPCNPCYPCGSRFSCRKMIL

SEQ ID NO: 3604 - protein, 20 aa, Homo sapiens
VMKTRLEADEVAAQLERCDK

SEQ ID NO: 3605 - protein, 20 aa, Homo sapiens
CSPGPRYNVNPKILRTGKDL

SEQ ID NO: 3606 - protein, 20 aa, Homo sapiens
TSAHVMSMGLLHFYKSRSCS

SEQ ID NO: 3607 - protein, 20 aa, Homo sapiens
QGQRGHTSMKAVYVEPAAAA

SEQ ID NO: 3608 - protein, 20 aa, Homo sapiens
VSHKVIRNDCVLDVMHAIYQ

SEQ ID NO: 3609 - protein, 20 aa, Homo sapiens
DTVQRLTYCLCHMYYNLPGI

SEQ ID NO: 3610 - protein, 20 aa, Homo sapiens
SAGSGQSPMTVLCSIDWFMV

SEQ ID NO: 3611 - protein, 20 aa, Homo sapiens
LLFSVLLLLSLVTGTQLGPR

SEQ ID NO: 3612 - protein, 20 aa, Homo sapiens
STAPPWLRHMAAAGISSTIT

SEQ ID NO: 3613 - protein, 20 aa, Homo sapiens
PAEVGDLFYDCVDTEIKFFK

SEQ ID NO: 3614 - protein, 20 aa, Homo sapiens
PIYLENQFILTPTVATTLAG

SEQ ID NO: 3615 - protein, 20 aa, Homo sapiens
GDNYPVQFIPSTMAAAAASG

SEQ ID NO: 3616 - protein, 20 aa, Homo sapiens
AQNGCLYVHSSVAQWRKCLH

SEQ ID NO: 3617 - protein, 20 aa, Homo sapiens
NDISCMLKVSRRSLHILSTS

SEQ ID NO: 3618 - protein, 20 aa, Homo sapiens
ISYVYMKRNYKAMTKLGFKV

SEQ ID NO: 3619 - protein, 20 aa, Homo sapiens
VMTKLGFKVTLPPFMRSKRA

SEQ ID NO: 3620 - protein, 20 aa, Homo sapiens
IIYVYMKRKYEAMTKLGFKA

SEQ ID NO: 3621 - protein, 20 aa, Homo sapiens
EILSKKQETLRILRLHCQEK

SEQ ID NO: 3622 - protein, 20 aa, Homo sapiens
ISNPGLFTSLGPPLRSTTCH

SEQ ID NO: 3623 - protein, 20 aa, Homo sapiens
LIIKAGTETAILATKGCIPE

SEQ ID NO: 3624 - protein, 20 aa, Homo sapiens
ATSREFTNAYKLPLAVGPPS

SEQ ID NO: 3625 - protein, 20 aa, Homo sapiens
QRFRGMLWFDLSLLPELVQC

SEQ ID NO: 3626 - protein, 20 aa, Homo sapiens
HLFALSTLYFYKFFLPTILS

SEQ ID NO: 3627 - protein, 20 aa, Homo sapiens
PSSRPRLLWQTPTTQTLPST

SEQ ID NO: 3628 - protein, 20 aa, Homo sapiens
NLNSHLIRHQRIHTREKPYE

SEQ ID NO: 3629 - protein, 20 aa, Homo sapiens
NRKVSRMRCLQNETYSALSP

SEQ ID NO: 3630 - protein, 20 aa, Homo sapiens
QRVAPEMFFSPQVFEQPGPS

SEQ ID NO: 3631 - protein, 20 aa, Homo sapiens
YVGKFLLQIPRATIIYANIS

SEQ ID NO: 3632 - protein, 20 aa, Homo sapiens
LLHCLGVFLSCSGHIQDEHP

SEQ ID NO: 3633 - protein, 20 aa, Homo sapiens
LAVSVILRVAKGYQELLEKC

SEQ ID NO: 3634 - protein, 20 aa, Homo sapiens
CPGSTMGYMAQSTQYEKCGG

SEQ ID NO: 3635 - protein, 20 aa, Homo sapiens
QQDTKGDYQKALLYLCGGDD

SEQ ID NO: 3636 - protein, 20 aa, Homo sapiens
MISSKPRLVVPYGLKTLLEG

SEQ ID NO: 3637 - protein, 20 aa, Homo sapiens
LIHCSGEMLKFTEKSLAKSI

SEQ ID NO: 3638 - protein, 20 aa, Homo sapiens
ILHFKNKYHENKKLIRCKVD

SEQ ID NO: 3639 - protein, 20 aa, Homo sapiens
LNFNVENSQELIQMYDSKME

SEQ ID NO: 3640 - protein, 20 aa, Homo sapiens
GDCEGVIFEGEPMYLNVGEV

SEQ ID NO: 3641 - protein, 20 aa, Homo sapiens
GFVPPPLAPIRGLLFPVDTR

SEQ ID NO: 3642 - protein, 20 aa, Homo sapiens
PGFVPPPLAPIRGPLFPVDA

SEQ ID NO: 3643 - protein, 20 aa, Homo sapiens
GCGIHAIELNPSRTLLATGG

SEQ ID NO: 3644 - protein, 20 aa, Homo sapiens
LQFHAGQAWVPTTHRRMISL

SEQ ID NO: 3645 - protein, 20 aa, Homo sapiens
KFITSILYENNVITIDLVQN

SEQ ID NO: 3646 - protein, 20 aa, Homo sapiens
TWDQVITLDQVLDEVIPIHG

SEQ ID NO: 3647 - protein, 20 aa, Homo sapiens
YFKIWAFLDVSFVERILKSQ

SEQ ID NO: 3648 - protein, 20 aa, Homo sapiens
ISLILVCLPIYCRSLFWRSE

SEQ ID NO: 3649 - protein, 20 aa, Homo sapiens
SNLRKICSPEAGLAEYLFDK

SEQ ID NO: 3650 - protein, 20 aa, Homo sapiens
AARDGHTQVVALLVAHGAEV

SEQ ID NO: 3651 - protein, 20 aa, Homo sapiens
RDGTGHYLCNACGLYHKMNG

SEQ ID NO: 3652 - protein, 20 aa, Homo sapiens
RLAQSYLKEPMIVYVGTLDL

SEQ ID NO: 3653 - protein, 20 aa, Homo sapiens
LPYSEYFEYFAPDFTLHPDV

SEQ ID NO: 3654 - protein, 20 aa, Homo sapiens
IFCIALILGAFFYWRSKNKE

SEQ ID NO: 3655 - protein, 20 aa, Homo sapiens
DLNKGIEAKIHTLLPWQCTN

SEQ ID NO: 3656 - protein, 20 aa, Homo sapiens
LYALPCVLSQTPLLKDLLNR

SEQ ID NO: 3657 - protein, 20 aa, Homo sapiens
PCDLPLRLLVPTQFVGAIIG

SEQ ID NO: 3658 - protein, 20 aa, Homo sapiens
WLIHGYRPVGSIPLWLQNFV

SEQ ID NO: 3659 - protein, 20 aa, Homo sapiens
EEGPSTSCILESLFRAVITK

SEQ ID NO: 3660 - protein, 20 aa, Homo sapiens
PQSAQIACSSPSVVASLPLD

SEQ ID NO: 3661 - protein, 20 aa, Homo sapiens
CIPEEVMWEVLSIMGVYAGR

SEQ ID NO: 3662 - protein, 20 aa, Homo sapiens
MVELVHFLLLKYRAREPVTK

SEQ ID NO: 3663 - protein, 20 aa, Homo sapiens
EFQAALSRKVAELVHFLLLK

SEQ ID NO: 3664 - protein, 20 aa, Homo sapiens
FPDIFSKASECMQVIFGIDV

SEQ ID NO: 3665 - protein, 20 aa, Homo sapiens
RRKLLMPLLGVIFLNGNSAT

SEQ ID NO: 3666 - protein, 20 aa, Homo sapiens
NCAREEEIWEFLNMLGIYDG

SEQ ID NO: 3667 - protein, 20 aa, Homo sapiens
AYAETTKMRVLRVLADSSNT

SEQ ID NO: 3668 - protein, 20 aa, Homo sapiens
LGLSNIKFRPGSVVVQLTLA

SEQ ID NO: 3669 - protein, 20 aa, Homo sapiens
DRFLYTFYFCCRELRELPPT

SEQ ID NO: 3670 - protein, 20 aa, Homo sapiens
MSVPPHYQYIPHLFSYSGHS

SEQ ID NO: 3671 - protein, 20 aa, Homo sapiens
LRHTPYSIRCERRMKWHSED

SEQ ID NO: 3672 - protein, 20 aa, Homo sapiens
LLWKKIHRMVILTILAIAPS

SEQ ID NO: 3673 - protein, 20 aa, Homo sapiens
RRDIKKVDRELRQLRCIDEF

SEQ ID NO: 3674 - protein, 20 aa, Homo sapiens
LPFQWRITHSFRWMAQVLAS

SEQ ID NO: 3675 - protein, 20 aa, Homo sapiens
LQEPCVAFNQQQLVQQEQHL

SEQ ID NO: 3676 - protein, 20 aa, Homo sapiens
LSHSPWAVKKINPICNDHYR

SEQ ID NO: 3677 - protein, 20 aa, Homo sapiens
TYKLCHIYYNWPGVIRVPAP

SEQ ID NO: 3678 - protein, 20 aa, Homo sapiens
CKYAHKLAFLSGHILHHEPA

SEQ ID NO: 3679 - protein, 20 aa, Homo sapiens
SEKILMQDHICQPVSAADWS

SEQ ID NO: 3680 - protein, 20 aa, Homo sapiens
CKKLKIFAMPMQDIKMILKM

SEQ ID NO: 3681 - protein, 20 aa, Homo sapiens
EGNYTLRVDCTPLMYSLVHN

SEQ ID NO: 3682 - protein, 20 aa, Homo sapiens
TVPPAFINMAATGVSSMSTR

SEQ ID NO: 3683 - protein, 20 aa, Homo sapiens
RNCPWTVALWSRYLLAMERH

SEQ ID NO: 3684 - protein, 20 aa, Homo sapiens
GVRCICSQLSLTTKMDAEHP

SEQ ID NO: 3685 - protein, 20 aa, Homo sapiens
TLIFSGFSGVPIVLAMTRVV

SEQ ID NO: 3686 - protein, 20 aa, Homo sapiens
AAAQQGFLFPPGITYKPGDN

SEQ ID NO: 3687 - protein, 20 aa, Homo sapiens
SKAERFKMMLTLISKGQKEL

SEQ ID NO: 3688 - protein, 20 aa, Homo sapiens
RYDEEVVKELMPLVVAVLEN

SEQ ID NO: 3689 - protein, 20 aa, Homo sapiens
SFEAHHLTVPAIRWLGLLPS

SEQ ID NO: 3690 - protein, 20 aa, Homo sapiens
HNRRIQVEHPQMTFGRLHRI

SEQ ID NO: 3691 - protein, 20 aa, Homo sapiens
PNRGNQVEHPQMTFGRLQGI

SEQ ID NO: 3692 - protein, 20 aa, Homo sapiens
KDLGEARTICEALQKELDSL

SEQ ID NO: 3693 - protein, 20 aa, Homo sapiens
TPWMDYEFRVIASNILGTGE

SEQ ID NO: 3694 - protein, 20 aa, Homo sapiens
LRLRETQDTLQLLVMTKCRL

SEQ ID NO: 3695 - protein, 20 aa, Homo sapiens
FCNDKDSLSQFWEFSETTAS

SEQ ID NO: 3696 - protein, 20 aa, Homo sapiens
EHSSKLRHPYLLQLMAVCLS

SEQ ID NO: 3697 - protein, 20 aa, Homo sapiens
QRILTVDSFAASSTVPHCEQ

SEQ ID NO: 3698 - protein, 20 aa, Homo sapiens
IPRSSLEYRASSRLKELAAP

SEQ ID NO: 3699 - protein, 20 aa, Homo sapiens
PTILSLSFFILLVLLLLLFI

SEQ ID NO: 3700 - protein, 20 aa, Homo sapiens
LVDVVYIFFDIKLLRNIPRW

SEQ ID NO: 3701 - protein, 20 aa, Homo sapiens
PEAVARRWPWMVSVRANGTH

SEQ ID NO: 3702 - protein, 20 aa, Homo sapiens
QALVCASAKEGTAFRMEAVQ

SEQ ID NO: 3703 - protein, 20 aa, Homo sapiens
EAPAFLPWHRLFLLRWEQEI

SEQ ID NO: 3704 - protein, 20 aa, Homo sapiens
RNQGYSTVTFDGTPSYGHTP

SEQ ID NO: 3705 - protein, 20 aa, Homo sapiens
CSECGRAFSQSSNLSQHQRI

SEQ ID NO: 3706 - protein, 20 aa, Homo sapiens
MNPEAIHFSGVKIFSNCSFE

SEQ ID NO: 3707 - protein, 20 aa, Homo sapiens
TMRSGFMQNEITCRMEFEEI

SEQ ID NO: 3708 - protein, 20 aa, Homo sapiens
SILDSYQCTAEISLADLATI

SEQ ID NO: 3709 - protein, 20 aa, Homo sapiens
GDLENAFLNLVQCIQNKPLY

SEQ ID NO: 3710 - protein, 20 aa, Homo sapiens
LQCSNLYLEKRVKELQMKIT

SEQ ID NO: 3711 - protein, 20 aa, Homo sapiens
LYPNPKPEVLHMIYMRALQI

SEQ ID NO: 3712 - protein, 20 aa, Homo sapiens
CGIAYCPNQDSLKYYYVCQY

SEQ ID NO: 3713 - protein, 20 aa, Homo sapiens
VTSRLYVRREKKFAVALSGL

SEQ ID NO: 3714 - protein, 20 aa, Homo sapiens
CFRQKQLLNAHFRKYHDANF

SEQ ID NO: 3715 - protein, 20 aa, Homo sapiens
GVKLVRMAATQIDSLCPQVI

SEQ ID NO: 3716 - protein, 20 aa, Homo sapiens
SFCGDYGMIDESIYFSSDVV

SEQ ID NO: 3717 - protein, 20 aa, Homo sapiens
ATVPATAAGVVAVVVPVPAG

SEQ ID NO: 3718 - protein, 20 aa, Homo sapiens
VVHGRLLSADTKGWVRLQFH

SEQ ID NO: 3719 - protein, 20 aa, Homo sapiens
MAPPQVLAFGLLLAAATATF

SEQ ID NO: 3720 - protein, 20 aa, Homo sapiens
GMTKYDYLMTLHGVVNESTV

SEQ ID NO: 3721 - protein, 20 aa, Homo sapiens
VLTKKFQVTMRGLLSCLSKS

SEQ ID NO: 3722 - protein, 20 aa, Homo sapiens
RAMRVAHLELATYELAATES

SEQ ID NO: 3723 - protein, 20 aa, Homo sapiens
PASSSSLSGGHASPHLFTFP

SEQ ID NO: 3724 - protein, 20 aa, Homo sapiens
LQVTRIFLQALNLGIEVINT

SEQ ID NO: 3725 - protein, 20 aa, Homo sapiens
FYTTDRVMTVSFHKYGEYFP

SEQ ID NO: 3726 - protein, 20 aa, Homo sapiens
NANIPSIYANGTHLVPGQHK

SEQ ID NO: 3727 - protein, 20 aa, Homo sapiens
VIFVTGLLLRKPNTYPKMIP

SEQ ID NO: 3728 - protein, 20 aa, Homo sapiens
ENDQVVVKITGHFYACQVAQ

SEQ ID NO: 3729 - protein, 20 aa, Homo sapiens
IQSAYEIIKLKGYTSWAIGL

SEQ ID NO: 3730 - protein, 20 aa, Homo sapiens
FNTQKKTVWLIHGYRPVGSI

SEQ ID NO: 3731 - protein, 20 aa, Homo sapiens
EALNMMGLYDGMEHLIYGEP

SEQ ID NO: 3732 - protein, 20 aa, Homo sapiens
KVLHHLLKISGGPHISYPPL

SEQ ID NO: 3733 - protein, 20 aa, Homo sapiens
EQQTASSSSTLVEVTLGEVP

SEQ ID NO: 3734 - protein, 20 aa, Homo sapiens
AEMLGSVVGNWQYFFPVIFS

SEQ ID NO: 3735 - protein, 20 aa, Homo sapiens
WEAGMLMHFILRKYKMREPI

SEQ ID NO: 3736 - protein, 20 aa, Homo sapiens
VVFGLELNKVNPNGHTYTFI

SEQ ID NO: 3737 - protein, 20 aa, Homo sapiens
LCNDVLAMKRSSSLPSWKSL

SEQ ID NO: 3738 - protein, 20 aa, Homo sapiens
MTPGTQSPFFLLLLLTVLTV

SEQ ID NO: 3739 - protein, 20 aa, Homo sapiens
AELFALLCRLADELLFRQIA

SEQ ID NO: 3740 - protein, 20 aa, Homo sapiens
HENENYLLHENCMLKKEIAM

SEQ ID NO: 3741 - protein, 20 aa, Homo sapiens
SQALGSLRTTTPAFTLNIPS

SEQ ID NO: 3742 - protein, 20 aa, Homo sapiens
ENRYDCLGSKKYSYMNICKE

SEQ ID NO: 3743 - protein, 20 aa, Homo sapiens
RTKAFRVDSTPGPAAYMLPM

SEQ ID NO: 3744 - protein, 20 aa, Homo sapiens
KVTFIFSTLMLFPINIWIFE

SEQ ID NO: 3745 - protein, 20 aa, Homo sapiens
KSSQRKLNWIPSFPTYDYFN

SEQ ID NO: 3746 - protein, 20 aa, Homo sapiens
MARGLKYLHQEKKLLHGDIK

SEQ ID NO: 3747 - protein, 20 aa, Homo sapiens
FVASINLTLTKWYSRVVFQM

SEQ ID NO: 3748 - protein, 20 aa, Homo sapiens
MSLKGHLQSVTAPMGITMKP

SEQ ID NO: 3749 - protein, 20 aa, Homo sapiens
PSLSHCSQLTTLSFYGNSIS

SEQ ID NO: 3750 - protein, 20 aa, Homo sapiens
VLPGLTYLTVAGIPAMSTRD

SEQ ID NO: 3751 - protein, 20 aa, Homo sapiens
FIDENVATHSAGIYLGIAEC

SEQ ID NO: 3752 - protein, 20 aa, Homo sapiens
CWPTGGATVAEARVYRDARG

SEQ ID NO: 3753 - protein, 20 aa, Homo sapiens
KEACAHLLAITAPKDLPMFL

SEQ ID NO: 3754 - protein, 20 aa, Homo sapiens
AGSIYREFERLIGRYDEEVV

SEQ ID NO: 3755 - protein, 20 aa, Homo sapiens
YVYMKRKYEAMTKLGFKAIL

SEQ ID NO: 3756 - protein, 20 aa, Homo sapiens
IKATKPLLMEQYCSIKIVDI

SEQ ID NO: 3757 - protein, 20 aa, Homo sapiens
KCCGLTSLPAVQAPVIQECY

SEQ ID NO: 3758 - protein, 20 aa, Homo sapiens
EVKGCTAMIGCRLMSGILAV

SEQ ID NO: 3759 - protein, 20 aa, Homo sapiens
ILKKGIYVDAVNSLGQTALF

SEQ ID NO: 3760 - protein, 20 aa, Homo sapiens
PTLRSLLWYDETLYAELLGK

SEQ ID NO: 3761 - protein, 20 aa, Homo sapiens
KRYVAYFAQVKHLYNWNLPP

SEQ ID NO: 3762 - protein, 20 aa, Homo sapiens
PRTSAPSRAGALLLLLLLLR

SEQ ID NO: 3763 - protein, 20 aa, Homo sapiens
YRVPERLRQGFCGVGRAAQA

SEQ ID NO: 3764 - protein, 20 aa, Homo sapiens
LAVLYCLLWSFQTSAGHFPR

SEQ ID NO: 3765 - protein, 20 aa, Homo sapiens
YASWFESFCQFTHYRCSNHV

SEQ ID NO: 3766 - protein, 20 aa, Homo sapiens
MAARTVIIDHGSGFLKAGTA

SEQ ID NO: 3767 - protein, 20 aa, Homo sapiens
SKPMRWPFFLFIPFFIIFCV

SEQ ID NO: 3768 - protein, 20 aa, Homo sapiens
NIVDSILDVIGVKVLLFGLE

SEQ ID NO: 3769 - protein, 20 aa, Homo sapiens
LTSSELMAITRKMAATAATC

SEQ ID NO: 3770 - protein, 20 aa, Homo sapiens
TNSLQKQLQAVLQWIAASQF

SEQ ID NO: 3771 - protein, 20 aa, Homo sapiens
ASALKSALSGHLETVILGLL

SEQ ID NO: 3772 - protein, 20 aa, Homo sapiens
NGKSQYYIMFGPDICGFDIK

SEQ ID NO: 3773 - protein, 20 aa, Homo sapiens
KALESNQMECQTALQKTQLQ

SEQ ID NO: 3774 - protein, 20 aa, Homo sapiens
PRYNVAEIVIHIRNKILTGA

SEQ ID NO: 3775 - protein, 20 aa, Homo sapiens
SREVTTNAQRWANKCTLQHS

SEQ ID NO: 3776 - protein, 20 aa, Homo sapiens
EHQSLVLVKRLLAVSVSCIT

SEQ ID NO: 3777 - protein, 20 aa, Homo sapiens
GTGVQSTFTTFYEVDCDVID

SEQ ID NO: 3778 - protein, 20 aa, Homo sapiens
IHTEEVCITSVHGRNGVIDY

SEQ ID NO: 3779 - protein, 20 aa, Homo sapiens
FYLLLASSILCALIVFWKYR

SEQ ID NO: 3780 - protein, 20 aa, Homo sapiens
RNYFSDIDFFPNAVYTHCYD

SEQ ID NO: 3781 - protein, 20 aa, Homo sapiens
QASGVRWCVVHGRLLSADTK

SEQ ID NO: 3782 - protein, 20 aa, Homo sapiens
GIAAGMKYLANMNYVHRDLA

SEQ ID NO: 3783 - protein, 20 aa, Homo sapiens
LHLITMMALKVLGELNILPN

SEQ ID NO: 3784 - protein, 20 aa, Homo sapiens
LIIAVLVSASIANLWLWMNQ

SEQ ID NO: 3785 - protein, 20 aa, Homo sapiens
LPIYCRSLFWRSEPADDLQR

SEQ ID NO: 3786 - protein, 20 aa, Homo sapiens
YTSYLYLSMAFYFNRDDVAL

SEQ ID NO: 3787 - protein, 20 aa, Homo sapiens
VSTWNSRILKRTAITICGFG

SEQ ID NO: 3788 - protein, 20 aa, Homo sapiens
RAMLGTHTMEVTVYHRRGSR

SEQ ID NO: 3789 - protein, 20 aa, Homo sapiens
KIKNIQSTTNTTIQIIQEQP

SEQ ID NO: 3790 - protein, 20 aa, Homo sapiens
EAIFKPVMSKVMEMFQPSAV

SEQ ID NO: 3791 - protein, 20 aa, Homo sapiens
FCSRYTGASLQGATQLNNKI

SEQ ID NO: 3792 - protein, 20 aa, Homo sapiens
MPATNVSIFINNTQLSDTGT

SEQ ID NO: 3793 - protein, 20 aa, Homo sapiens
WEGEDLSKKTLLRFWLPFGF

SEQ ID NO: 3794 - protein, 20 aa, Homo sapiens
SMNLQAHLIPGLNLNALGLF

SEQ ID NO: 3795 - protein, 20 aa, Homo sapiens
VIGSGCNLDSARFRYLIGEK

SEQ ID NO: 3796 - protein, 20 aa, Homo sapiens
LETNCNFISFPCRSYKDYKT

SEQ ID NO: 3797 - protein, 20 aa, Homo sapiens
PARYEFLWGPRALAETSYVK

SEQ ID NO: 3798 - protein, 20 aa, Homo sapiens
CAPEEKIWEELSVLEASDGR

SEQ ID NO: 3799 - protein, 20 aa, Homo sapiens
ELVTKAEMLERVIKNYKRCF

SEQ ID NO: 3800 - protein, 20 aa, Homo sapiens
VAKLVHFLLLKYRAREPVTK

SEQ ID NO: 3801 - protein, 20 aa, Homo sapiens
AGARPRVAARRGTTAMTSAY

SEQ ID NO: 3802 - protein, 20 aa, Homo sapiens
EEVIWEVLNAVGVYAGREHF

SEQ ID NO: 3803 - protein, 20 aa, Homo sapiens
KCGTLLVIYNLKLLLNGEPE

SEQ ID NO: 3804 - protein, 20 aa, Homo sapiens
TTQKEFFQGCIMQPVKDLLK

SEQ ID NO: 3805 - protein, 20 aa, Homo sapiens
NRFPDLMMCLPEIRYIAGKM

SEQ ID NO: 3806 - protein, 20 aa, Homo sapiens
QTERMLCFSVNGVFKEVEGQ

SEQ ID NO: 3807 - protein, 20 aa, Homo sapiens
INLVDVYGNTALHYAVYSEI

SEQ ID NO: 3808 - protein, 20 aa, Homo sapiens
FSDFKDFIFDDMYIVQKYIS

SEQ ID NO: 3809 - protein, 20 aa, Homo sapiens
IEAARRQFQSQLADLQQLPD

SEQ ID NO: 3810 - protein, 20 aa, Homo sapiens
TKPCAPVVTFGIKHSDYMTP

SEQ ID NO: 3811 - protein, 20 aa, Homo sapiens
KSFWSLILSHPSGAVSCSSS

SEQ ID NO: 3812 - protein, 20 aa, Homo sapiens
PLGPAGLGAEEPAAGPQLPS

SEQ ID NO: 3813 - protein, 20 aa, Homo sapiens
GYRAFTEANDGSLCLAMEYG

SEQ ID NO: 3814 - protein, 20 aa, Homo sapiens
GILGSILLPSFQIALLTSED

SEQ ID NO: 3815 - protein, 20 aa, Homo sapiens
LRDWGLSFDSNLLSFSGRIL

SEQ ID NO: 3816 - protein, 20 aa, Homo sapiens
TITSCEWVDFYLLAHHVRQG

SEQ ID NO: 3817 - protein, 20 aa, Homo sapiens
TYCLCHMYYNLPGIIRVPAP

SEQ ID NO: 3818 - protein, 20 aa, Homo sapiens
TWKLPTLAKFSPYLGQMINL

SEQ ID NO: 3819 - protein, 20 aa, Homo sapiens
SVLLLLSLVTGTQLGPRTPL

SEQ ID NO: 3820 - protein, 20 aa, Homo sapiens
PLLTTNLSPQCLSLLHAMVA

SEQ ID NO: 3821 - protein, 20 aa, Homo sapiens
RRFGQNYERIFILLEEVQGS

SEQ ID NO: 3822 - protein, 20 aa, Homo sapiens
IHYFTGTPDPSRSIFKPFIF

SEQ ID NO: 3823 - protein, 20 aa, Homo sapiens
VIVSTLEMSCKALMRFIMVT

SEQ ID NO: 3824 - protein, 20 aa, Homo sapiens
QIQVQGHMPPLMIPIFPHDQ

SEQ ID NO: 3825 - protein, 20 aa, Homo sapiens
NCTCGATAVAVPSNIQGIRN

SEQ ID NO: 3826 - protein, 20 aa, Homo sapiens
AHRKHTMLQECKERISALNL

SEQ ID NO: 3827 - protein, 20 aa, Homo sapiens
RNGGTSMMVENMAVRPAPHP

SEQ ID NO: 3828 - protein, 20 aa, Homo sapiens
VIYSPGEFYCHVLKEDALKK

SEQ ID NO: 3829 - protein, 20 aa, Homo sapiens
QAPVIQECYQPYYLPGYRYL

SEQ ID NO: 3830 - protein, 20 aa, Homo sapiens
ADPANMFNWTTEEVETCDKG

SEQ ID NO: 3831 - protein, 20 aa, Homo sapiens
LICREDNAVSAATALLESEE

SEQ ID NO: 3832 - protein, 20 aa, Homo sapiens
EQAQEEITRLRREMMKSCKS

SEQ ID NO: 3833 - protein, 20 aa, Homo sapiens
KLKQELKYSNYVRPICLPGT

SEQ ID NO: 3834 - protein, 20 aa, Homo sapiens
LYRNGDFFISSKDLGYDYSY

SEQ ID NO: 3835 - protein, 20 aa, Homo sapiens
SDNHTTPILCGAQYRIHTHG

SEQ ID NO: 3836 - protein, 20 aa, Homo sapiens
GLPHIRVFLDNNPWVCDCHM

SEQ ID NO: 3837 - protein, 20 aa, Homo sapiens
TLYPGFTKRLFRELMGDHVS

SEQ ID NO: 3838 - protein, 20 aa, Homo sapiens
PRTISLESLAVILAQLLSLS

SEQ ID NO: 3839 - protein, 20 aa, Homo sapiens
TSSYANRRPCFSSLVVDETY

SEQ ID NO: 3840 - protein, 20 aa, Homo sapiens
PDGECSIDDLSFYVNRLSSL

SEQ ID NO: 3841 - protein, 20 aa, Homo sapiens
PSSEAAEDVMVAAPLVCSGK

SEQ ID NO: 3842 - protein, 20 aa, Homo sapiens
FKKIKANYVCLQERYMTEMQ

SEQ ID NO: 3843 - protein, 20 aa, Homo sapiens
SGTIFDNFLITDDEEYADNF

SEQ ID NO: 3844 - protein, 20 aa, Homo sapiens
FLWQYKSSADKMQQLNAAHQ

SEQ ID NO: 3845 - protein, 20 aa, Homo sapiens
KGLCTNSCQYQDLLSNCDSL

SEQ ID NO: 3846 - protein, 20 aa, Homo sapiens
KWMLGCYDALQKKYLRMVVL

SEQ ID NO: 3847 - protein, 20 aa, Homo sapiens
AFLSPPTLLEGPLRLSPLLP

SEQ ID NO: 3848 - protein, 20 aa, Homo sapiens
RQSLQQCVAISIQQELYSPQ

SEQ ID NO: 3849 - protein, 20 aa, Homo sapiens
RAARALLSAVTRLLILADMA

SEQ ID NO: 3850 - protein, 20 aa, Homo sapiens
ILCALIVFWKYRRFQRNTGE

SEQ ID NO: 3851 - protein, 20 aa, Homo sapiens
AVSLDGYFHLWKAENTLSKL

SEQ ID NO: 3852 - protein, 20 aa, Homo sapiens
GGSPVKNSLRGLPGPYVPGQ

SEQ ID NO: 3853 - protein, 20 aa, Homo sapiens
RKRKAVTKRARLQRSYEMNE

SEQ ID NO: 3854 - protein, 20 aa, Homo sapiens
KDTEITCSERVRTYWIIIEL

SEQ ID NO: 3855 - protein, 20 aa, Homo sapiens
TQKVTCFYQPAPYFAAEARY

SEQ ID NO: 3856 - protein, 20 aa, Homo sapiens
GHASPHLFTFPPTPPKDVSP

SEQ ID NO: 3857 - protein, 20 aa, Homo sapiens
KEPMIVYVGTLDLVAVSSVK

SEQ ID NO: 3858 - protein, 20 aa, Homo sapiens
RLFENLRMLPHAPGVQMQAI

SEQ ID NO: 3859 - protein, 20 aa, Homo sapiens
DRVMTVSFHKYGNYFFPGTG

SEQ ID NO: 3860 - protein, 20 aa, Homo sapiens
LYQGGQMFDGAPRFHGRVGF

SEQ ID NO: 3861 - protein, 20 aa, Homo sapiens
TRQLCFVVRSKVNIYCSDDG

SEQ ID NO: 3862 - protein, 20 aa, Homo sapiens
CDVDKLHFTPRIQRLNELEA

SEQ ID NO: 3863 - protein, 20 aa, Homo sapiens
NDGTKIAASQAISAMCENSG

SEQ ID NO: 3864 - protein, 20 aa, Homo sapiens
VADLVGFLLLKYRAREPVTK

SEQ ID NO: 3865 - protein, 20 aa, Homo sapiens
GMLSDVQSMPKTGILILILS

SEQ ID NO: 3866 - protein, 20 aa, Homo sapiens
REDSVFAHPRKLLMQDLVQE

SEQ ID NO: 3867 - protein, 20 aa, Homo sapiens
KVLHHMVKISGGPHISYPPL

SEQ ID NO: 3868 - protein, 20 aa, Homo sapiens
LHHMVKISGGPRISYPLLHE

SEQ ID NO: 3869 - protein, 20 aa, Homo sapiens
FLWGPRALAETSYVKVLEHV

SEQ ID NO: 3870 - protein, 20 aa, Homo sapiens
LKVAELVHFLLHKYRVKEPV

SEQ ID NO: 3871 - protein, 20 aa, Homo sapiens
YDGILHSIYGDARKIITEDL

SEQ ID NO: 3872 - protein, 20 aa, Homo sapiens
KMVNVPLEQLPLLFKVVLHS

SEQ ID NO: 3873 - protein, 20 aa, Homo sapiens
TLKIIERNFPELLSLNLCNN

SEQ ID NO: 3874 - protein, 20 aa, Homo sapiens
ACLQRKMNVDVSSTIYNNEV

SEQ ID NO: 3875 - protein, 20 aa, Homo sapiens
CKPAELSRGRGILIFSDFKD

SEQ ID NO: 3876 - protein, 20 aa, Homo sapiens
DELERKLEATSAQNIEFLQV

SEQ ID NO: 3877 - protein, 20 aa, Homo sapiens
GPAYSILGRYQTKTMLTPGP

SEQ ID NO: 3878 - protein, 20 aa, Homo sapiens
RWMAQVLASELSLVAFILLL

SEQ ID NO: 3879 - protein, 20 aa, Homo sapiens
STYNLLFCGSCGIPVGFHLY

SEQ ID NO: 3880 - protein, 20 aa, Homo sapiens
CSTPTINIPASPFMQKLGFG

SEQ ID NO: 3881 - protein, 20 aa, Homo sapiens
VTGQPSQDNCIFVVNEQTVA

SEQ ID NO: 3882 - protein, 20 aa, Homo sapiens
AWNSCNEYMPSRIIVYRDGV

SEQ ID NO: 3883 - protein, 20 aa, Homo sapiens
IAGPIGMRMSPPAWVELKDD

SEQ ID NO: 3884 - protein, 20 aa, Homo sapiens
KMSTYLKTISPNNFTLAFIV

SEQ ID NO: 3885 - protein, 20 aa, Homo sapiens
ADCLKVFMTGALNKWYKYNH

SEQ ID NO: 3886 - protein, 20 aa, Homo sapiens
ELFPPLFMAAFDGRHSQTLK

SEQ ID NO: 3887 - protein, 20 aa, Homo sapiens
VIMDWEECSKMFPKLTKNML

SEQ ID NO: 3888 - protein, 20 aa, Homo sapiens
FKYHLTVAQVRGGMVFELAN

SEQ ID NO: 3889 - protein, 20 aa, Homo sapiens
APECLLTDGFYTYKMDLWSA

SEQ ID NO: 3890 - protein, 20 aa, Homo sapiens
GRCWIYNKTKMAFLLVGICF

SEQ ID NO: 3891 - protein, 20 aa, Homo sapiens
QRKRFTRVEMARVLMERNQY

SEQ ID NO: 3892 - protein, 20 aa, Homo sapiens
DADPHGIEIMCIYKYGSMSM

SEQ ID NO: 3893 - protein, 20 aa, Homo sapiens
CSEEYLERQLQAEFIESGQY

SEQ ID NO: 3894 - protein, 20 aa, Homo sapiens
PGLSYRWLLNEFPNFIPTDG

SEQ ID NO: 3895 - protein, 20 aa, Homo sapiens
LECAANEVNCPLQVALECLY

SEQ ID NO: 3896 - protein, 20 aa, Homo sapiens
VREACPHQLLTQPRKTENGA

SEQ ID NO: 3897 - protein, 20 aa, Homo sapiens
KREKNSYYVFLKYKRQVNEC

SEQ ID NO: 3898 - protein, 20 aa, Homo sapiens
GLFGVFLVLLDVTLILADLI

SEQ ID NO: 3899 - protein, 20 aa, Homo sapiens
LQVSSYQHWIWDCLNGQALA

SEQ ID NO: 3900 - protein, 20 aa, Homo sapiens
CGVGRAAQALVCASAKEGTA

SEQ ID NO: 3901 - protein, 20 aa, Homo sapiens
DINIYDLFVWMHYYVSMDAL

SEQ ID NO: 3902 - protein, 20 aa, Homo sapiens
FKDCERRFSRSDQLKRHQRR

SEQ ID NO: 3903 - protein, 20 aa, Homo sapiens
ALSRLRELCCQWLKPEIHTK

SEQ ID NO: 3904 - protein, 20 aa, Homo sapiens
WVCDCHMADMVTWLKETEVV

SEQ ID NO: 3905 - protein, 20 aa, Homo sapiens
QYPNYCSFKSQQCLMRNRNR

SEQ ID NO: 3906 - protein, 20 aa, Homo sapiens
SGLLTGVVVDSGYGLTRVQP

SEQ ID NO: 3907 - protein, 20 aa, Homo sapiens
TTGEANELLHTFLRWKTSYL

SEQ ID NO: 3908 - protein, 20 aa, Homo sapiens
KHLPVFTYTDQGAILEDQPF

SEQ ID NO: 3909 - protein, 20 aa, Homo sapiens
AEDLIVSALLLIQYHLAQGG

SEQ ID NO: 3910 - protein, 20 aa, Homo sapiens
YCVQDTTSANTTLVHQTTPS

SEQ ID NO: 3911 - protein, 20 aa, Homo sapiens
QLPEQIVIPFTDQVACLKEN

SEQ ID NO: 3912 - protein, 20 aa, Homo sapiens
KSVSQYLEMDKTLSKKEEEV

SEQ ID NO: 3913 - protein, 20 aa, Homo sapiens
QSDLQFLNFNVENSQELIQM

SEQ ID NO: 3914 - protein, 20 aa, Homo sapiens
SVSCITYLRGIFPECAYGTR

SEQ ID NO: 3915 - protein, 20 aa, Homo sapiens
SLYPPTLLEGPLRLSPLLPR

SEQ ID NO: 3916 - protein, 20 aa, Homo sapiens
FCGDYGMIDESIYFSSDVVT

SEQ ID NO: 3917 - protein, 20 aa, Homo sapiens
EAAAGATAVPAATVPATAAG

SEQ ID NO: 3918 - protein, 20 aa, Homo sapiens
CEPASEPSSFTVTPVIEEDE

SEQ ID NO: 3919 - protein, 20 aa, Homo sapiens
ARAVQPKALNSCSIPVSVEA

SEQ ID NO: 3920 - protein, 20 aa, Homo sapiens
PGNEEFQVVKDAVLDCLLDF

SEQ ID NO: 3921 - protein, 20 aa, Homo sapiens
LLSCLSKSNNRLKSLSIQYL

SEQ ID NO: 3922 - protein, 20 aa, Homo sapiens
RRKAKGRNRRSHRAMRVAHL

SEQ ID NO: 3923 - protein, 20 aa, Homo sapiens
GDPQLCHFLESHYLHEQVKT

SEQ ID NO: 3924 - protein, 20 aa, Homo sapiens
EISGDEFLNFLLKLNKQCGH

SEQ ID NO: 3925 - protein, 20 aa, Homo sapiens
ANGDPVCNACGLYYKLHNIN

SEQ ID NO: 3926 - protein, 20 aa, Homo sapiens
TLCYLMPGFIHLVLQPSLKG

SEQ ID NO: 3927 - protein, 20 aa, Homo sapiens
CWTYETSLLVEEAISEELPY

SEQ ID NO: 3928 - protein, 20 aa, Homo sapiens
SESPGSIQVARGQPAVLPCT

SEQ ID NO: 3929 - protein, 20 aa, Homo sapiens
ESSCEIKLKWSIPLGPIPAR

SEQ ID NO: 3930 - protein, 20 aa, Homo sapiens
TEEIPLKILAHNNFVGRLIG

SEQ ID NO: 3931 - protein, 20 aa, Homo sapiens
PDVKKNSMECIYNLVQDFQC

SEQ ID NO: 3932 - protein, 20 aa, Homo sapiens
NSQCKITIVGTGAVGMACAI

SEQ ID NO: 3933 - protein, 20 aa, Homo sapiens
KLQEVKILAQFYNDFVNISS

SEQ ID NO: 3934 - protein, 20 aa, Homo sapiens
LESVIKNYKHCFPEIFGKAS

SEQ ID NO: 3935 - protein, 20 aa, Homo sapiens
WVQEKYLVYRQVPGTDPACY

SEQ ID NO: 3936 - protein, 20 aa, Homo sapiens
IGHLYILVTCLGLSYDGLLG

SEQ ID NO: 3937 - protein, 20 aa, Homo sapiens
ISHLYILVTCLGLSYDGLLG

SEQ ID NO: 3938 - protein, 20 aa, Homo sapiens
LGDNQIMPKAGLLIIVLAII

SEQ ID NO: 3939 - protein, 20 aa, Homo sapiens
GTDVKEVDPAGHSYILVTAL

SEQ ID NO: 3940 - protein, 20 aa, Homo sapiens
CATEEEVWEFLGLLGIYDGI

SEQ ID NO: 3941 - protein, 20 aa, Homo sapiens
AGALEDFPARWSFRAYTSVL

SEQ ID NO: 3942 - protein, 20 aa, Homo sapiens
KNYGQLDIFPARDTYHPMSE

SEQ ID NO: 3943 - protein, 20 aa, Homo sapiens
TPQTQHQLKALCSLAAEGMW

SEQ ID NO: 3944 - protein, 20 aa, Homo sapiens
MCLPEIRYIAGKMVNVPLEQ

SEQ ID NO: 3945 - protein, 20 aa, Homo sapiens
RNWFKVTIPYGIKYDKAWLM

SEQ ID NO: 3946 - protein, 20 aa, Homo sapiens
IQDAQKRTALHWACVNGHEE

SEQ ID NO: 3947 - protein, 20 aa, Homo sapiens
KPLTIYVYQEGLVRFATEKF

SEQ ID NO: 3948 - protein, 20 aa, Homo sapiens
TWRPHRPRGPIMALYSSPGP

SEQ ID NO: 3949 - protein, 20 aa, Homo sapiens
RSCSDLENGKVTFIFSTLML

SEQ ID NO: 3950 - protein, 20 aa, Homo sapiens
GHFCLSSDKMVCYLLKTKAI

SEQ ID NO: 3951 - protein, 20 aa, Homo sapiens
KMGGELWRVDIPLKLVMIVG

SEQ ID NO: 3952 - protein, 20 aa, Homo sapiens
DSLKLCLVGSLKKFYEVNHC

SEQ ID NO: 3953 - protein, 20 aa, Homo sapiens
SLVNYNLWIEKVTQLEGRPF

SEQ ID NO: 3954 - protein, 20 aa, Homo sapiens
LHETDSAVATARRPRWLCAG

SEQ ID NO: 3955 - protein, 20 aa, Homo sapiens
PQCLSLLHAMVAYDPDERIA

SEQ ID NO: 3956 - protein, 20 aa, Homo sapiens
PAPGNILSTAPPWLRHMAAA

SEQ ID NO: 3957 - protein, 20 aa, Homo sapiens
WGAEMGANEHGVCIANEAIN

SEQ ID NO: 3958 - protein, 20 aa, Homo sapiens
FLFAAVVAWCTLIPLSCFPN

SEQ ID NO: 3959 - protein, 20 aa, Homo sapiens
YPSLWGFGTTKTFKIPIEHL

SEQ ID NO: 3960 - protein, 20 aa, Homo sapiens
TVVDNIINDISCMLKVSRRS

SEQ ID NO: 3961 - protein, 20 aa, Homo sapiens
LKGERPGAAHQAGPDVLIGQ

SEQ ID NO: 3962 - protein, 20 aa, Homo sapiens
QPITSSHLALPFQIIRCSLE

SEQ ID NO: 3963 - protein, 20 aa, Homo sapiens
EKCMGMRKTFPCTPRLVGHT

SEQ ID NO: 3964 - protein, 20 aa, Homo sapiens
IGCRLMSGILAVGPMFVREA

SEQ ID NO: 3965 - protein, 20 aa, Homo sapiens
PLPTQLYNWAAPEVILQKAA

SEQ ID NO: 3966 - protein, 20 aa, Homo sapiens
LCWPSVYWTERFLEDTTLTI

SEQ ID NO: 3967 - protein, 20 aa, Homo sapiens
NLPPRRILFIKHFIIYSIPR

SEQ ID NO: 3968 - protein, 20 aa, Homo sapiens
DQMTQTASDVPVLQVIMHSR

SEQ ID NO: 3969 - protein, 20 aa, Homo sapiens
NLLSPASFFSSWQIVCSRLE

SEQ ID NO: 3970 - protein, 20 aa, Homo sapiens
KRPFMCAYPGCNKRYFKLSH

SEQ ID NO: 3971 - protein, 20 aa, Homo sapiens
GTCDQSFKWNSDFINHQIIY

SEQ ID NO: 3972 - protein, 20 aa, Homo sapiens
TGNQLAVLPAGAFARRPPLA

SEQ ID NO: 3973 - protein, 20 aa, Homo sapiens
GSDTTVVAQKVFQLIGLTNA

SEQ ID NO: 3974 - protein, 20 aa, Homo sapiens
RQFETVCKFHWVEAFDDEMT

SEQ ID NO: 3975 - protein, 20 aa, Homo sapiens
SEKTKRLNELKLSVVSLKEI

SEQ ID NO: 3976 - protein, 20 aa, Homo sapiens
SDPTSWSSAIQSWYDEILDF

SEQ ID NO: 3977 - protein, 20 aa, Homo sapiens
FEGEPMYLNVGEVSTPFHIF

SEQ ID NO: 3978 - protein, 20 aa, Homo sapiens
PGPPRAPFAMRNVYLPRGFL

SEQ ID NO: 3979 - protein, 20 aa, Homo sapiens
KTFRTVTLLRNHVNTHTGTR

SEQ ID NO: 3980 - protein, 20 aa, Homo sapiens
AGAIRGRAARVIHIINAEME

SEQ ID NO: 3981 - protein, 20 aa, Homo sapiens
PSAPGSRTPGNPATAVSGTP

SEQ ID NO: 3982 - protein, 20 aa, Homo sapiens
NVCLAYGSEWSVYAVGSQAH

SEQ ID NO: 3983 - protein, 20 aa, Homo sapiens
SFYQPSLFPYYNNLYNCPQY

SEQ ID NO: 3984 - protein, 20 aa, Homo sapiens
MELQAARACFALLWGCALAA

SEQ ID NO: 3985 - protein, 20 aa, Homo sapiens
RILLQEIPIRSISLRSCYFS

SEQ ID NO: 3986 - protein, 20 aa, Homo sapiens
SLEEDSALEALLNFFFPTTC

SEQ ID NO: 3987 - protein, 20 aa, Homo sapiens
AENMKCLQFSKDVIISDTKD

SEQ ID NO: 3988 - protein, 20 aa, Homo sapiens
AINSHITLELYTSYLYLSMA

SEQ ID NO: 3989 - protein, 20 aa, Homo sapiens
LLDSGISVDSNFQYGWTPLM

SEQ ID NO: 3990 - protein, 20 aa, Homo sapiens
RTACLVVAMLLSLDFPGQAQ

SEQ ID NO: 3991 - protein, 20 aa, Homo sapiens
VHDVTHVYNFDFPRNIEEYV

SEQ ID NO: 3992 - protein, 20 aa, Homo sapiens
NNKICDIAINWAGGLHHAKK

SEQ ID NO: 3993 - protein, 20 aa, Homo sapiens
NIGLIAGAIGTGAVIIIFCI

SEQ ID NO: 3994 - protein, 20 aa, Homo sapiens
CAVNTFLTENSPYSLLEVLC

SEQ ID NO: 3995 - protein, 20 aa, Homo sapiens
LIPGLNLNALGLFPPTSGMP

SEQ ID NO: 3996 - protein, 20 aa, Homo sapiens
PEEEVVIHEFASLCLANMSA

SEQ ID NO: 3997 - protein, 20 aa, Homo sapiens
YSPDCKILVVSNPVDILTYI

SEQ ID NO: 3998 - protein, 20 aa, Homo sapiens
NKRPCLEFSQLSVKDSFRDL

SEQ ID NO: 3999 - protein, 20 aa, Homo sapiens
PVTKAEMLESVIKNYKHCFP

SEQ ID NO: 4000 - protein, 20 aa, Homo sapiens
SDPARYEFLWGPRAHAEIRK

SEQ ID NO: 4001 - protein, 20 aa, Homo sapiens
LVHLLLRKYRVKGLITKAEM

SEQ ID NO: 4002 - protein, 20 aa, Homo sapiens
MPKTGFLIIILAIIAKEGDC

SEQ ID NO: 4003 - protein, 20 aa, Homo sapiens
GLSCDSMLGDGHSMPKAALL

SEQ ID NO: 4004 - protein, 20 aa, Homo sapiens
RNGLLMPLLSVIFLNGNCAR

SEQ ID NO: 4005 - protein, 20 aa, Homo sapiens
VTEAEMLMIVIKYKDYFPVI

SEQ ID NO: 4006 - protein, 20 aa, Homo sapiens
SPGSGSSTTQGQDVTLAPAT

SEQ ID NO: 4007 - protein, 20 aa, Homo sapiens
EYISEMLLRNKSVRYLDLSA

SEQ ID NO: 4008 - protein, 20 aa, Homo sapiens
RKQRNRCQYCRLLKCLQMGM

SEQ ID NO: 4009 - protein, 20 aa, Homo sapiens
NLCNNKLYQLDGLSDITEKA

SEQ ID NO: 4010 - protein, 20 aa, Homo sapiens
QFIPLTFVMPNDYTKFVAEY

SEQ ID NO: 4011 - protein, 20 aa, Homo sapiens
MTEEVWMGTWRPHRPRGPIM

SEQ ID NO: 4012 - protein, 20 aa, Homo sapiens
IFSTLMLFPINIWIFELERN

SEQ ID NO: 4013 - protein, 20 aa, Homo sapiens
KKERPISMINEASNYNVTSD

SEQ ID NO: 4014 - protein, 20 aa, Homo sapiens
PLISVKPLDNWLLIYTRRNY

SEQ ID NO: 4015 - protein, 20 aa, Homo sapiens
ERINLKNTSFITSQELNWVK

SEQ ID NO: 4016 - protein, 20 aa, Homo sapiens
PGIIRVPAPCHYAHKLAYLV

SEQ ID NO: 4017 - protein, 20 aa, Homo sapiens
NDNSEAQLAHLIPELCFLTG

SEQ ID NO: 4018 - protein, 20 aa, Homo sapiens
EPGEKWYQVGIISWGKSCGE

SEQ ID NO: 4019 - protein, 20 aa, Homo sapiens
GAKGVILYSDPADYFAPGVK

SEQ ID NO: 4020 - protein, 20 aa, Homo sapiens
LSSVGLHMTKGLALWEAYRE

SEQ ID NO: 4021 - protein, 20 aa, Homo sapiens
ENKLLQLKSSATYGKSCQDL

SEQ ID NO: 4022 - protein, 20 aa, Homo sapiens
LVAIFIAFYGDRKKVIWFVA

SEQ ID NO: 4023 - protein, 20 aa, Homo sapiens
VAEARVYRDARGRASSEPHI

SEQ ID NO: 4024 - protein, 20 aa, Homo sapiens
ADGNVKAFYRRALAHKGLKN

SEQ ID NO: 4025 - protein, 20 aa, Homo sapiens
DSTLRLYHAHTYQHLQDVDI

SEQ ID NO: 4026 - protein, 20 aa, Homo sapiens
TATRRKPHLLLVAAVALVSS

SEQ ID NO: 4027 - protein, 20 aa, Homo sapiens
NSWRPSLFYKIANVQTCPDE

SEQ ID NO: 4028 - protein, 20 aa, Homo sapiens
KTENGATCLPIPVWGLQLLL

SEQ ID NO: 4029 - protein, 20 aa, Homo sapiens
GQPSLCSFEINEIYSGCLIL

SEQ ID NO: 4030 - protein, 20 aa, Homo sapiens
SCKSPKSTTAHAILRRVETE

SEQ ID NO: 4031 - protein, 20 aa, Homo sapiens
KVDPYRSCGFSYEQDPTLRD

SEQ ID NO: 4032 - protein, 20 aa, Homo sapiens
FSDHNFAGSNKIAEILCKDL

SEQ ID NO: 4033 - protein, 20 aa, Homo sapiens
VGAVLTALLAGLVSLLCRHK

SEQ ID NO: 4034 - protein, 20 aa, Homo sapiens
LALIGAIFLLVLYLNRKGIK

SEQ ID NO: 4035 - protein, 20 aa, Homo sapiens
ISLRPLLVSHVMACGGNTLY

SEQ ID NO: 4036 - protein, 20 aa, Homo sapiens
IFCVLIAIMVKVNFQRKKWR

SEQ ID NO: 4037 - protein, 20 aa, Homo sapiens
FGGQKHIIHIKVKKLLFSKH

SEQ ID NO: 4038 - protein, 20 aa, Homo sapiens
QHACAVMKNFGTRTFQAITV

SEQ ID NO: 4039 - protein, 20 aa, Homo sapiens
EVVSDLIDSFLRNLHSVTGT

SEQ ID NO: 4040 - protein, 20 aa, Homo sapiens
KLDKYHSLNEELDFLVTSYE

SEQ ID NO: 4041 - protein, 20 aa, Homo sapiens
CGFDIKKVHVILHFKNKYHE

SEQ ID NO: 4042 - protein, 20 aa, Homo sapiens
PFSNLVTHLDSFLPICRVND

SEQ ID NO: 4043 - protein, 20 aa, Homo sapiens
RAAVAGFFAVLFLWRSFRSV

SEQ ID NO: 4044 - protein, 20 aa, Homo sapiens
CCQCSYASRDTYKLKRHMRT

SEQ ID NO: 4045 - protein, 20 aa, Homo sapiens
WCPPPFFYRRRFVRGPRPPN

SEQ ID NO: 4046 - protein, 20 aa, Homo sapiens
GTLNKVFASQWLNHRQVVCG

SEQ ID NO: 4047 - protein, 20 aa, Homo sapiens
PQGRAGGFGKASGALVGAAS

SEQ ID NO: 4048 - protein, 20 aa, Homo sapiens
ALNSCSIPVSVEAFLMQASG

SEQ ID NO: 4049 - protein, 20 aa, Homo sapiens
LEPHMNYTFTVEARNGVSGL

SEQ ID NO: 4050 - protein, 20 aa, Homo sapiens
EIRFTNLTWDQVITLDQVLD

SEQ ID NO: 4051 - protein, 20 aa, Homo sapiens
EVKFMNPYNAVLTKKFQVTM

SEQ ID NO: 4052 - protein, 20 aa, Homo sapiens
FKCFAPFRDVPKQMMQMFGL

SEQ ID NO: 4053 - protein, 20 aa, Homo sapiens
SEECEASKGYYLTKALTGHN

SEQ ID NO: 4054 - protein, 20 aa, Homo sapiens
SHYLHEQVKTIKELGGYVSN

SEQ ID NO: 4055 - protein, 20 aa, Homo sapiens
ANASFEKDKQSILITACSAH

SEQ ID NO: 4056 - protein, 20 aa, Homo sapiens
PTHHGSQVCRPPLLHGSLPW

SEQ ID NO: 4057 - protein, 20 aa, Homo sapiens
PDATCHQVRSFFQRLQPGLK

SEQ ID NO: 4058 - protein, 20 aa, Homo sapiens
QSQAWPIVLQGIDLIGVAQT

SEQ ID NO: 4059 - protein, 20 aa, Homo sapiens
HSDDYIKFLRSIRPDNMSEY

SEQ ID NO: 4060 - protein, 20 aa, Homo sapiens
YGQGHPMKPHRIRMTHNLLL

SEQ ID NO: 4061 - protein, 20 aa, Homo sapiens
LHHAKKFEASGFCYVNDIVI

SEQ ID NO: 4062 - protein, 20 aa, Homo sapiens
TFTTSAALINLNVIWMVTPL

SEQ ID NO: 4063 - protein, 20 aa, Homo sapiens
GFILILVIFVTGLLLRKPNT

SEQ ID NO: 4064 - protein, 20 aa, Homo sapiens
VQFLLFKYQMKEPITKAEIL

SEQ ID NO: 4065 - protein, 20 aa, Homo sapiens
FREASVCMQLLFGIDVKEVD

SEQ ID NO: 4066 - protein, 20 aa, Homo sapiens
LETSFQVALSRKMAELVHFL

SEQ ID NO: 4067 - protein, 20 aa, Homo sapiens
VIFSKASEYLQLVFGIEVVE

SEQ ID NO: 4068 - protein, 20 aa, Homo sapiens
MPKAGLLIIVLAIIAREGDC

SEQ ID NO: 4069 - protein, 20 aa, Homo sapiens
GHSYILVTCLGLSYDGLLGD

SEQ ID NO: 4070 - protein, 20 aa, Homo sapiens
SMPKAALLIIVLGVILTKDN

SEQ ID NO: 4071 - protein, 20 aa, Homo sapiens
DPPRYQFLWGPRAYAETTKM

SEQ ID NO: 4072 - protein, 20 aa, Homo sapiens
WEVLNAVGVYAGREHFVYGE

SEQ ID NO: 4073 - protein, 20 aa, Homo sapiens
AMGIPFIIQCDLCLKWRVLP

SEQ ID NO: 4074 - protein, 20 aa, Homo sapiens
TLVHNGTSARATTTPASKST

SEQ ID NO: 4075 - protein, 20 aa, Homo sapiens
QEANFHIIDNVDLVVSAYCL

SEQ ID NO: 4076 - protein, 20 aa, Homo sapiens
LKPWLLEVNYSPALTLDCST

SEQ ID NO: 4077 - protein, 20 aa, Homo sapiens
TPGPAAYRQTDVRVTKFKAP

SEQ ID NO: 4078 - protein, 20 aa, Homo sapiens
SELSLVAFILLLVVAFSKKW

SEQ ID NO: 4079 - protein, 20 aa, Homo sapiens
GPQLPSWLQPERCAVFQCAQ

SEQ ID NO: 4080 - protein, 20 aa, Homo sapiens
HHPNIVGYRAFTEANDGSLC

SEQ ID NO: 4081 - protein, 20 aa, Homo sapiens
PNVECKSMRFGMLKDHQAVT

SEQ ID NO: 4082 - protein, 20 aa, Homo sapiens
LQLWDLKFDTNFLSVPGRVL

SEQ ID NO: 4083 - protein, 20 aa, Homo sapiens
MLLFSVLLLLSLVTGTQLGP

SEQ ID NO: 4084 - protein, 20 aa, Homo sapiens
GDFGSCRSVYSKQPYTEYIS

SEQ ID NO: 4085 - protein, 20 aa, Homo sapiens
VYDYNCHVDLIRLLRLEGEL

SEQ ID NO: 4086 - protein, 20 aa, Homo sapiens
MAAAPPSYCFVAFPPRAKDG

SEQ ID NO: 4087 - protein, 20 aa, Homo sapiens
SCQDLQREISILQEQISHLQ

SEQ ID NO: 4088 - protein, 20 aa, Homo sapiens
NPVLICLALSKATEYLVIIG

SEQ ID NO: 4089 - protein, 20 aa, Homo sapiens
RRQEMRQFFTVGQQPQIPIT

SEQ ID NO: 4090 - protein, 20 aa, Homo sapiens
VDYKTVLQIDCGLQLANDSV

SEQ ID NO: 4091 - protein, 20 aa, Homo sapiens
LKDSILSIVHVKGIVLVALA

SEQ ID NO: 4092 - protein, 20 aa, Homo sapiens
HILSTSKGLIAGNLRYIEED

SEQ ID NO: 4093 - protein, 20 aa, Homo sapiens
VLWSKGTEILVNSSRVTVTP

SEQ ID NO: 4094 - protein, 20 aa, Homo sapiens
LPTLRSALFSRYSPHDWDQS

SEQ ID NO: 4095 - protein, 20 aa, Homo sapiens
HCPTCVALGTCFSAPSLPCP

SEQ ID NO: 4096 - protein, 20 aa, Homo sapiens
TEALIVCEQDVSRMRRQLDE

SEQ ID NO: 4097 - protein, 20 aa, Homo sapiens
MRPEGSLTYRVPERLRQGFC

SEQ ID NO: 4098 - protein, 20 aa, Homo sapiens
PPPPSQASSGQARMFPNAPY

SEQ ID NO: 4099 - protein, 20 aa, Homo sapiens
VPTDLPAYVRNLFLTGNQLA

SEQ ID NO: 4100 - protein, 20 aa, Homo sapiens
IYDENSYWRNQNPGSLLQLP

SEQ ID NO: 4101 - protein, 20 aa, Homo sapiens
IPRATIIYANISGHLCIAVE

SEQ ID NO: 4102 - protein, 20 aa, Homo sapiens
NCSYGDFWEYTVERTKCLLE

SEQ ID NO: 4103 - protein, 20 aa, Homo sapiens
FNQWKQNATDIMEAMLKRLV

SEQ ID NO: 4104 - protein, 20 aa, Homo sapiens
HLETVILGLLKTPAQYDASE

SEQ ID NO: 4105 - protein, 20 aa, Homo sapiens
EKMDNQEYKDAYKFAADVRL

SEQ ID NO: 4106 - protein, 20 aa, Homo sapiens
YHENKKLIRCKVDGFTHLYT

SEQ ID NO: 4107 - protein, 20 aa, Homo sapiens
MVAVHQQQLLSWEEDRQKVL

SEQ ID NO: 4108 - protein, 20 aa, Homo sapiens
EKMKDTVQKLKNARQEVVEK

SEQ ID NO: 4109 - protein, 20 aa, Homo sapiens
RGPLFPVDARGPFLRRGPPF

SEQ ID NO: 4110 - protein, 20 aa, Homo sapiens
PFKCSMCKYASVEASKLKRH

SEQ ID NO: 4111 - protein, 20 aa, Homo sapiens
DSLCPQVINAALTLAARPQS

SEQ ID NO: 4112 - protein, 20 aa, Homo sapiens
FYEHIITVGTGQGSLLFYDI

SEQ ID NO: 4113 - protein, 20 aa, Homo sapiens
HGRLLSADTKGWVRLQFHAG

SEQ ID NO: 4114 - protein, 20 aa, Homo sapiens
NRQCQCTSVGAQNTVICSKL

SEQ ID NO: 4115 - protein, 20 aa, Homo sapiens
CSPGFFKFEASESPCLECPE

SEQ ID NO: 4116 - protein, 20 aa, Homo sapiens
GDFQEAMTHLQHKLICTRKP

SEQ ID NO: 4117 - protein, 20 aa, Homo sapiens
PQDQSCWAFLPDLCLCRVFW

SEQ ID NO: 4118 - protein, 20 aa, Homo sapiens
EQLKCLLDECILKQKSIIKL

SEQ ID NO: 4119 - protein, 20 aa, Homo sapiens
HEIFNLLSFTLNPLEGKLQQ

SEQ ID NO: 4120 - protein, 20 aa, Homo sapiens
FSHSSHMLTTPTPMHPPSSL

SEQ ID NO: 4121 - protein, 20 aa, Homo sapiens
SSRRRELIQKLKSFISFYSA

SEQ ID NO: 4122 - protein, 20 aa, Homo sapiens
LHDPSGYLAEADLSYTWDFG

SEQ ID NO: 4123 - protein, 20 aa, Homo sapiens
CYVNDIVLAILELLKYHQRV

SEQ ID NO: 4124 - protein, 20 aa, Homo sapiens
YGAGHPMKPHRLALTHSLVL

SEQ ID NO: 4125 - protein, 20 aa, Homo sapiens
IGTGAVIIIFCIALILGAFF

SEQ ID NO: 4126 - protein, 20 aa, Homo sapiens
CTNGSEVQSSWAETTYWISP

SEQ ID NO: 4127 - protein, 20 aa, Homo sapiens
MPKTGFLIIVLVMIAMEGGH

SEQ ID NO: 4128 - protein, 20 aa, Homo sapiens
NMMGLYDGMEHLIYGEPRKL

SEQ ID NO: 4129 - protein, 20 aa, Homo sapiens
LGLVGAQALQAEEQEAAFFS

SEQ ID NO: 4130 - protein, 20 aa, Homo sapiens
FTKAEMLGSVIRNFQDFFPV

SEQ ID NO: 4131 - protein, 20 aa, Homo sapiens
LLGDNQVMPKTGLLIIVLAI

SEQ ID NO: 4132 - protein, 20 aa, Homo sapiens
LVHFLLLKYRAREPVTKAEM

SEQ ID NO: 4133 - protein, 20 aa, Homo sapiens
LLGDNQIMPKTGFLIIILAI

SEQ ID NO: 4134 - protein, 20 aa, Homo sapiens
HAETSYEKVINYLVMLNARE

SEQ ID NO: 4135 - protein, 20 aa, Homo sapiens
DPPRFQFLWGPRAYAETSKM

SEQ ID NO: 4136 - protein, 20 aa, Homo sapiens
DGNQSSAWTLPRNGLLMPLL

SEQ ID NO: 4137 - protein, 20 aa, Homo sapiens
SILKADMLKCVRREYKPYFP

SEQ ID NO: 4138 - protein, 20 aa, Homo sapiens
DYFPVILKRAREFMELLFGL

SEQ ID NO: 4139 - protein, 20 aa, Homo sapiens
GSAATWGQDVTSVPVTRPAL

SEQ ID NO: 4140 - protein, 20 aa, Homo sapiens
NVSCNQLDTGVPLLCEALCS

SEQ ID NO: 4141 - protein, 20 aa, Homo sapiens
PLGTPMLIEDGYAVTQAELF

SEQ ID NO: 4142 - protein, 20 aa, Homo sapiens
AVTCGFHHIHEQIMEYIRKL

SEQ ID NO: 4143 - protein, 20 aa, Homo sapiens
AEMDGAAAAKQVMALKDTIG

SEQ ID NO: 4144 - protein, 20 aa, Homo sapiens
PMVMGPNTVGKASQPSFSIK

SEQ ID NO: 4145 - protein, 20 aa, Homo sapiens
AVFQCAQCHAVLADSVHLAW

SEQ ID NO: 4146 - protein, 20 aa, Homo sapiens
GFMITLSTDGVIICVAENIS

SEQ ID NO: 4147 - protein, 20 aa, Homo sapiens
ADIFAFGLTLWEMMTLSIPH

SEQ ID NO: 4148 - protein, 20 aa, Homo sapiens
TFKLCHMYWNWPGTIRVPAP

SEQ ID NO: 4149 - protein, 20 aa, Homo sapiens
NNFTLAFIVVKKRINTRFFL

SEQ ID NO: 4150 - protein, 20 aa, Homo sapiens
IPQHKLSLWPGFAISVSYFE

SEQ ID NO: 4151 - protein, 20 aa, Homo sapiens
FDECGITDDQLLALLPSLSH

SEQ ID NO: 4152 - protein, 20 aa, Homo sapiens
AMNFDFPFKKGSGIPLLTTN

SEQ ID NO: 4153 - protein, 20 aa, Homo sapiens
LEEDLQIATKTICQLTEEKE

SEQ ID NO: 4154 - protein, 20 aa, Homo sapiens
SCHSFQSAYLIVDRDEAWVL

SEQ ID NO: 4155 - protein, 20 aa, Homo sapiens
CCSLDLLMKKIKGKDLQLLE

SEQ ID NO: 4156 - protein, 20 aa, Homo sapiens
KATEYLVIIGASEFLPIYLE

SEQ ID NO: 4157 - protein, 20 aa, Homo sapiens
GSDQHVASHLPLHPIMHNKP

SEQ ID NO: 4158 - protein, 20 aa, Homo sapiens
GDTFLLLIQSLKNNLIEKDP

SEQ ID NO: 4159 - protein, 20 aa, Homo sapiens
KSDSPKSAQKFSLILKILSM

SEQ ID NO: 4160 - protein, 20 aa, Homo sapiens
NQEKLCMLTAELLEYCNAPK

SEQ ID NO: 4161 - protein, 20 aa, Homo sapiens
PVWGLQLLLPLLLPSFIHFS

SEQ ID NO: 4162 - protein, 20 aa, Homo sapiens
LKRLSSFIGAGSPSLVKACD

SEQ ID NO: 4163 - protein, 20 aa, Homo sapiens
LSKPIFCFVKDVHPDLEMND

SEQ ID NO: 4164 - protein, 20 aa, Homo sapiens
SRAAQMAVPSSRILQLSKPK

SEQ ID NO: 4165 - protein, 20 aa, Homo sapiens
IALQEKESEIQLLKEHLCLA

SEQ ID NO: 4166 - protein, 20 aa, Homo sapiens
AGCQKSEAPPIYLQVSSYQH

SEQ ID NO: 4167 - protein, 20 aa, Homo sapiens
ALLAGLVSLLCRHKRKQLPE

SEQ ID NO: 4168 - protein, 20 aa, Homo sapiens
PVETKAHFDSSEPQLLWDCD

SEQ ID NO: 4169 - protein, 20 aa, Homo sapiens
PILPPSLQTSYVFLGIVLAL

SEQ ID NO: 4170 - protein, 20 aa, Homo sapiens
FESFCQFTHYRCSNHVYYAK

SEQ ID NO: 4171 - protein, 20 aa, Homo sapiens
CDRRCLFQLETVAVTQMNKC

SEQ ID NO: 4172 - protein, 20 aa, Homo sapiens
KMCDANYAGGVVLHPRTISL

SEQ ID NO: 4173 - protein, 20 aa, Homo sapiens
CSQPRCIMHEGNPPITKFSN

SEQ ID NO: 4174 - protein, 20 aa, Homo sapiens
TLHRNEYGIASILDSYQCTA

SEQ ID NO: 4175 - protein, 20 aa, Homo sapiens
DILCPKAKRTSRFLSGIINF

SEQ ID NO: 4176 - protein, 20 aa, Homo sapiens
APPWEQDYRMMFPPPGQSYP

SEQ ID NO: 4177 - protein, 20 aa, Homo sapiens
KGAKGTFHCDVCMFTSSRMS

SEQ ID NO: 4178 - protein, 20 aa, Homo sapiens
PHCRDEMAAARGALKKNATM

SEQ ID NO: 4179 - protein, 20 aa, Homo sapiens
TKCNTLFVVDVQTSQITKIP

SEQ ID NO: 4180 - protein, 20 aa, Homo sapiens
KVCRDTLRDWCQQLGLSTNG

SEQ ID NO: 4181 - protein, 20 aa, Homo sapiens
SKLAAKCLVMKAEMNGSKLG

SEQ ID NO: 4182 - protein, 20 aa, Homo sapiens
ERYMCSRFFIDFPHIEEQQK

SEQ ID NO: 4183 - protein, 20 aa, Homo sapiens
WASPQNFTSVCEELVNNVED

SEQ ID NO: 4184 - protein, 20 aa, Homo sapiens
IDKYWREYILSLEELVNGMY

SEQ ID NO: 4185 - protein, 20 aa, Homo sapiens
GTATLRLVKRQVPLDCVLYR

SEQ ID NO: 4186 - protein, 20 aa, Homo sapiens
HYGLYKKMIVFKPYQASQHD

SEQ ID NO: 4187 - protein, 20 aa, Homo sapiens
GRQCVEHYRLLHRYCVFSHD

SEQ ID NO: 4188 - protein, 20 aa, Homo sapiens
TGAVGMACAISILLKDLADE

SEQ ID NO: 4189 - protein, 20 aa, Homo sapiens
GASLDNFHFIGVSLGAHISG

SEQ ID NO: 4190 - protein, 20 aa, Homo sapiens
LESLFRAVITKKVADLVGFL

SEQ ID NO: 4191 - protein, 20 aa, Homo sapiens
AQIACSSPSVVASLPLDQSD

SEQ ID NO: 4192 - protein, 20 aa, Homo sapiens
LGDNQIVPKTGLLIIVLAII

SEQ ID NO: 4193 - protein, 20 aa, Homo sapiens
YLQLVFGIEVVEVVPISHLY

SEQ ID NO: 4194 - protein, 20 aa, Homo sapiens
IGHLYIFATCLGLSYDGLLG

SEQ ID NO: 4195 - protein, 20 aa, Homo sapiens
IWKFMNVLGAYDGEEHLIYG

SEQ ID NO: 4196 - protein, 20 aa, Homo sapiens
CATEEKIWEFLNKMRIYDGK

SEQ ID NO: 4197 - protein, 20 aa, Homo sapiens
RLSKDAVKKKACTLAQFLQK

SEQ ID NO: 4198 - protein, 20 aa, Homo sapiens
RYTGYFPVIFRKAREFIEIL

SEQ ID NO: 4199 - protein, 20 aa, Homo sapiens
ARWSFRAYTSVLYFNPWMRI

SEQ ID NO: 4200 - protein, 20 aa, Homo sapiens
QSGAGVPGWGIALLVLVCVL

SEQ ID NO: 4201 - protein, 20 aa, Homo sapiens
LVANFEKARRAHWIFLGCFL

SEQ ID NO: 4202 - protein, 20 aa, Homo sapiens
QLNKRYWYICQDFTEYKYTH

SEQ ID NO: 4203 - protein, 20 aa, Homo sapiens
DQSAYVSAIRDCFPKLLRLD

SEQ ID NO: 4204 - protein, 20 aa, Homo sapiens
TRKDCLAKHLKHMRRMYGTS

SEQ ID NO: 4205 - protein, 20 aa, Homo sapiens
IDTSNSEAISSSSIPQFPIT

SEQ ID NO: 4206 - protein, 20 aa, Homo sapiens
KELTPTSPDCLRYYNILFRR

SEQ ID NO: 4207 - protein, 20 aa, Homo sapiens
LETWGLHFGSQISLTGRIVP

SEQ ID NO: 4208 - protein, 20 aa, Homo sapiens
VLPGLAYLATADMPAMSTRD

SEQ ID NO: 4209 - protein, 20 aa, Homo sapiens
MIGYALGYVLGAPLVKVPEN

SEQ ID NO: 4210 - protein, 20 aa, Homo sapiens
FVRITALMVSCNRLWVGTGN

SEQ ID NO: 4211 - protein, 20 aa, Homo sapiens
KKLWDTFHVPVFTLVDADPH

SEQ ID NO: 4212 - protein, 20 aa, Homo sapiens
EDVPLAAKLVDLPCVIESLR

SEQ ID NO: 4213 - protein, 20 aa, Homo sapiens
GYVDYGNFEILSLMRLCPII

SEQ ID NO: 4214 - protein, 20 aa, Homo sapiens
QDTLQLLVMTKCRLEHELAI

SEQ ID NO: 4215 - protein, 20 aa, Homo sapiens
AFCELQTYHDQLVELLEETK

SEQ ID NO: 4216 - protein, 20 aa, Homo sapiens
IKLLRNIPRWTHLLRLLRLI

SEQ ID NO: 4217 - protein, 20 aa, Homo sapiens
WVLTVAHCLIWRDVIYSVRV

SEQ ID NO: 4218 - protein, 20 aa, Homo sapiens
STPMFNDINIYDLFVWMHYY

SEQ ID NO: 4219 - protein, 20 aa, Homo sapiens
PFMCAYPGCNKRYFKLSHLQ

SEQ ID NO: 4220 - protein, 20 aa, Homo sapiens
HDGCERRLNLNSNEFTHQKS

SEQ ID NO: 4221 - protein, 20 aa, Homo sapiens
VESTPMIMENIQELIRSAQE

SEQ ID NO: 4222 - protein, 20 aa, Homo sapiens
LNWEGVQYLWSFVLENHRRE

SEQ ID NO: 4223 - protein, 20 aa, Homo sapiens
DEVSFYANRLTNLVIAMARK

SEQ ID NO: 4224 - protein, 20 aa, Homo sapiens
IDDLSFYVNRLSSLVIQMAH

SEQ ID NO: 4225 - protein, 20 aa, Homo sapiens
RTKKELASALKSALSGHLET

SEQ ID NO: 4226 - protein, 20 aa, Homo sapiens
PSNINQFAAAYFQELTMYRG

SEQ ID NO: 4227 - protein, 20 aa, Homo sapiens
SPASELIAIQDSHSLGSSKS

SEQ ID NO: 4228 - protein, 20 aa, Homo sapiens
EGKDPAFTALLTTQLQVQRE

SEQ ID NO: 4229 - protein, 20 aa, Homo sapiens
FAVLFFLWRSFRSVRSRLYV

SEQ ID NO: 4230 - protein, 20 aa, Homo sapiens
KKNATMLYTASQAFLRHPDV

SEQ ID NO: 4231 - protein, 20 aa, Homo sapiens
NEDNIYISNSIYFSIAIVSE

SEQ ID NO: 4232 - protein, 20 aa, Homo sapiens
SRVLHGYAAQQLPSLLKERE

SEQ ID NO: 4233 - protein, 20 aa, Homo sapiens
NLLRGIDSLFSAPMDFRGLP

SEQ ID NO: 4234 - protein, 20 aa, Homo sapiens
IAERQRVMAAQVALRRQQAQ

SEQ ID NO: 4235 - protein, 20 aa, Homo sapiens
KRDNRVAYMNPIAMARWRGP

SEQ ID NO: 4236 - protein, 20 aa, Homo sapiens
EHLEVKFMNPYNAVLTKKFQ

SEQ ID NO: 4237 - protein, 20 aa, Homo sapiens
ISDTKDYFMSKTLGIGRLKR

SEQ ID NO: 4238 - protein, 20 aa, Homo sapiens
MSWRGRSTYRPRPRRYVEPP

SEQ ID NO: 4239 - protein, 20 aa, Homo sapiens
SRGKSTYYWPRPRRYVQPPE

SEQ ID NO: 4240 - protein, 20 aa, Homo sapiens
WRGRSTYYWPRPRRYVQPPE

SEQ ID NO: 4241 - protein, 20 aa, Homo sapiens
ALSRHMSSLSHISPFSHSSH

SEQ ID NO: 4242 - protein, 20 aa, Homo sapiens
DGGNKHFLRNQPLTFALQLH

SEQ ID NO: 4243 - protein, 20 aa, Homo sapiens
KKVNFLDMSLDDIIIYKELE

SEQ ID NO: 4244 - protein, 20 aa, Homo sapiens
IQNHDIMHAIISPLRSANTV

SEQ ID NO: 4245 - protein, 20 aa, Homo sapiens
PDSRLLQLHITMPFSSPMEA

SEQ ID NO: 4246 - protein, 20 aa, Homo sapiens
QRNVAIMKSIIPAIVHYSPD

SEQ ID NO: 4247 - protein, 20 aa, Homo sapiens
VKVLEYVIKVSARVRFFFPS

SEQ ID NO: 4248 - protein, 20 aa, Homo sapiens
DPTSHSYVLVTSLNLSYDGI

SEQ ID NO: 4249 - protein, 20 aa, Homo sapiens
GREDSVFAHPRKLLMQDLVQ

SEQ ID NO: 4250 - protein, 20 aa, Homo sapiens
FPVIFSKASSSLQLVFGIEL

SEQ ID NO: 4251 - protein, 20 aa, Homo sapiens
VNARVRIAYPSLREAALLEE

SEQ ID NO: 4252 - protein, 20 aa, Homo sapiens
KKLLTQYFVQENYLEYRQVP

SEQ ID NO: 4253 - protein, 20 aa, Homo sapiens
RAPEEAIWEALSVMGLYDGR

SEQ ID NO: 4254 - protein, 20 aa, Homo sapiens
PAQLEFMFQEALKLKVAELV

SEQ ID NO: 4255 - protein, 20 aa, Homo sapiens
SSDPPRFQFLWGPRAYAETS

SEQ ID NO: 4256 - protein, 20 aa, Homo sapiens
LIMKTNMLVQFLMEMYKMKK

SEQ ID NO: 4257 - protein, 20 aa, Homo sapiens
RPVSSFFSYTLASLLQSSHE

SEQ ID NO: 4258 - protein, 20 aa, Homo sapiens
ATVMASESLSVMSSNVSFSE

SEQ ID NO: 4259 - protein, 20 aa, Homo sapiens
EIYNEYIYDLFVPVSSKFQK

SEQ ID NO: 4260 - protein, 20 aa, Homo sapiens
GVSFFFLSFHISNLQFNSSL

SEQ ID NO: 4261 - protein, 20 aa, Homo sapiens
EEAFSRASLVSVYNSYPYYP

SEQ ID NO: 4262 - protein, 20 aa, Homo sapiens
SLLRKKMLPEASLLIAIKPV

SEQ ID NO: 4263 - protein, 20 aa, Homo sapiens
IERLIYLYHKFHQLKVSNEE

SEQ ID NO: 4264 - protein, 20 aa, Homo sapiens
ADKDLYVAEALSTLESWRSR

SEQ ID NO: 4265 - protein, 20 aa, Homo sapiens
NSPLPFQWRITHSFRWMAQV

SEQ ID NO: 4266 - protein, 20 aa, Homo sapiens
MGFLRRLIYRRRPMIYVESS

SEQ ID NO: 4267 - protein, 20 aa, Homo sapiens
GPDMEAFQQELALLKIEDEP

SEQ ID NO: 4268 - protein, 20 aa, Homo sapiens
RGDGQEAPDVVAFVAPGESQ

SEQ ID NO: 4269 - protein, 20 aa, Homo sapiens
GTDVEAFQQELALLKIEDAP

SEQ ID NO: 4270 - protein, 20 aa, Homo sapiens
KNTPGIYTSLVNYNLWIEKV

SEQ ID NO: 4271 - protein, 20 aa, Homo sapiens
SNPIVLRMMNDQLMFLERAF

SEQ ID NO: 4272 - protein, 20 aa, Homo sapiens
GSTGFSSRLAATQDLPFIHQ

SEQ ID NO: 4273 - protein, 20 aa, Homo sapiens
KDSITVFVSNLPYSMQEPDT

SEQ ID NO: 4274 - protein, 20 aa, Homo sapiens
KLNQEYSQQFLTLFQQWDLD

SEQ ID NO: 4275 - protein, 20 aa, Homo sapiens
TSELKTEGVSPYLMLIRLRK

SEQ ID NO: 4276 - protein, 20 aa, Homo sapiens
KERQLSTMITQLISLREQLL

SEQ ID NO: 4277 - protein, 20 aa, Homo sapiens
PDNIPAFAAAYFESLLEKRE

SEQ ID NO: 4278 - protein, 20 aa, Homo sapiens
KKMKTSESSTILVVRYRRNV

SEQ ID NO: 4279 - protein, 20 aa, Homo sapiens
TRIQFIRWSHTRIFQVPSEM

SEQ ID NO: 4280 - protein, 20 aa, Homo sapiens
AEIQALTFLSSDYLSRVYLP

SEQ ID NO: 4281 - protein, 20 aa, Homo sapiens
VERPQMTFGRLQGISPKIMP

SEQ ID NO: 4282 - protein, 20 aa, Homo sapiens
QRPQMTFGRLQGIFPKIMPK

SEQ ID NO: 4283 - protein, 20 aa, Homo sapiens
EFEETAKKVRRAIEQLAAMD

SEQ ID NO: 4284 - protein, 20 aa, Homo sapiens
LFLRSQEAAATVQLFQEEHR

SEQ ID NO: 4285 - protein, 20 aa, Homo sapiens
ESGQYRANEGTSSIVMEIQK

SEQ ID NO: 4286 - protein, 20 aa, Homo sapiens
SSEVLEYMNQLSASLKETYA

SEQ ID NO: 4287 - protein, 20 aa, Homo sapiens
GKINQNYASIITEAFPKPKD

SEQ ID NO: 4288 - protein, 20 aa, Homo sapiens
VSRAAQMAVPSSRILQLSKP

SEQ ID NO: 4289 - protein, 20 aa, Homo sapiens
DLDLTYVTERIIAMSFPSSG

SEQ ID NO: 4290 - protein, 20 aa, Homo sapiens
EELQKVQFEKVSALADLSST

SEQ ID NO: 4291 - protein, 20 aa, Homo sapiens
HNRESYMVPFIPLYRNGDFF

SEQ ID NO: 4292 - protein, 20 aa, Homo sapiens
QTPGINLDLGSGVKVKIIPK

SEQ ID NO: 4293 - protein, 20 aa, Homo sapiens
SRQKKIRIQLRSQVLGREMR

SEQ ID NO: 4294 - protein, 20 aa, Homo sapiens
MSWRGRSTYRPRPRRSLQPP

SEQ ID NO: 4295 - protein, 20 aa, Homo sapiens
MIWRGRSTYRPRPRRSVPPP

SEQ ID NO: 4296 - protein, 20 aa, Homo sapiens
SHKTPFVSPLLASQSLSIGN

SEQ ID NO: 4297 - protein, 20 aa, Homo sapiens
RIVEIVVVIDNYLYIRYERN

SEQ ID NO: 4298 - protein, 20 aa, Homo sapiens
STPPSAYGSVKAYTNFDAER

SEQ ID NO: 4299 - protein, 20 aa, Homo sapiens
QLLQARLMKEESPVVSWRLE

SEQ ID NO: 4300 - protein, 20 aa, Homo sapiens
AKYSSVYMEAEATALLSDTS

SEQ ID NO: 4301 - protein, 20 aa, Homo sapiens
ENHPKSMTMMPALFKENRND

SEQ ID NO: 4302 - protein, 20 aa, Homo sapiens
ATAQLQRTPMSALVFPNKIS

SEQ ID NO: 4303 - protein, 20 aa, Homo sapiens
ALKKLIHAAKLNASLKTLEG

SEQ ID NO: 4304 - protein, 20 aa, Homo sapiens
NTGEMSSNSTALALVRPSSS

SEQ ID NO: 4305 - protein, 20 aa, Homo sapiens
GQGSLLFYDIRAQRFLEERL

SEQ ID NO: 4306 - protein, 20 aa, Homo sapiens
TELHPRVAFWIIKLPRRRSH

SEQ ID NO: 4307 - protein, 20 aa, Homo sapiens
SDSTYYSSFYQPSLFPYYNN

SEQ ID NO: 4308 - protein, 20 aa, Homo sapiens
GKKIEVYLRLHRHAYPEQRQ

SEQ ID NO: 4309 - protein, 20 aa, Homo sapiens
EKEKDVRSLSKKRKKSYPDD

SEQ ID NO: 4310 - protein, 20 aa, Homo sapiens
RRQFEFSVDSFQIVLDPMLD

SEQ ID NO: 4311 - protein, 20 aa, Homo sapiens
EVMRRQLYAVNRRLRALEEQ

SEQ ID NO: 4312 - protein, 20 aa, Homo sapiens
NLKVNFFFERIMKYERLARI

SEQ ID NO: 4313 - protein, 20 aa, Homo sapiens
KLQELSAASPTISSFSPRLE

SEQ ID NO: 4314 - protein, 20 aa, Homo sapiens
GWESGLVAMESAFHLEKNVN

SEQ ID NO: 4315 - protein, 20 aa, Homo sapiens
EEMRSHYVAQTGILWLLMNN

SEQ ID NO: 4316 - protein, 20 aa, Homo sapiens
MNLSRGKSTYYWPRPRRYVQ

SEQ ID NO: 4317 - protein, 20 aa, Homo sapiens
MSWRGRSTYYWPRPRRYVQP

SEQ ID NO: 4318 - protein, 20 aa, Homo sapiens
EKFKKAMTIGDVSLVQELLD

SEQ ID NO: 4319 - protein, 20 aa, Homo sapiens
KPHRIRMTHNLLLNYGLYRK

SEQ ID NO: 4320 - protein, 20 aa, Homo sapiens
MASFRKLTLSEKVPPNHPSR

SEQ ID NO: 4321 - protein, 20 aa, Homo sapiens
PIRSSYFTFQLQNIVKPLPP

SEQ ID NO: 4322 - protein, 20 aa, Homo sapiens
YENDIASMNLQAHLIPGLNL

SEQ ID NO: 4323 - protein, 20 aa, Homo sapiens
ATVLTNMAMQEPLRLNIQNH

SEQ ID NO: 4324 - protein, 20 aa, Homo sapiens
GAVLKDFTVSGNLLFMSVRD

SEQ ID NO: 4325 - protein, 20 aa, Homo sapiens
AQFYNDFVNISSIGLTYFQS

SEQ ID NO: 4326 - protein, 20 aa, Homo sapiens
VSARVRFFFPSLREAALREE

SEQ ID NO: 4327 - protein, 20 aa, Homo sapiens
ESVIRNYEDHFPLLFSEASE

SEQ ID NO: 4328 - protein, 20 aa, Homo sapiens
PDLESEFQAAISRKMVELVH

SEQ ID NO: 4329 - protein, 20 aa, Homo sapiens
VVGNWQYFFPVIFSKASSSL

SEQ ID NO: 4330 - protein, 20 aa, Homo sapiens
VVGNWQYFFPVIFSKASDSL

SEQ ID NO: 4331 - protein, 20 aa, Homo sapiens
DGREHSVYWKLRKLLTQEWV

SEQ ID NO: 4332 - protein, 20 aa, Homo sapiens
AHAETSYEKVINYLVMLNAR

SEQ ID NO: 4333 - protein, 20 aa, Homo sapiens
TEEEIWKFMNVLGAYDGEEH

SEQ ID NO: 4334 - protein, 20 aa, Homo sapiens
TNKKKVSFSSPLILGATIQK

SEQ ID NO: 4335 - protein, 20 aa, Homo sapiens
VAARRGTTAMTSAYSRATSS

SEQ ID NO: 4336 - protein, 20 aa, Homo sapiens
PQILNRTSQHLVVAFGVELK

SEQ ID NO: 4337 - protein, 20 aa, Homo sapiens
NPASSFFSSALLSIFQSSPE

SEQ ID NO: 4338 - protein, 20 aa, Homo sapiens
SSASSTLYLVFSPSSFSTSS

SEQ ID NO: 4339 - protein, 20 aa, Homo sapiens
RSQAGMFIYSNNRLIKMHEK

SEQ ID NO: 4340 - protein, 20 aa, Homo sapiens
YEQANLNMANSIKFSVWVSF

SEQ ID NO: 4341 - protein, 20 aa, Homo sapiens
PQKRSRAAFSHTQVIELERK

SEQ ID NO: 4342 - protein, 20 aa, Homo sapiens
GINNVSFSGQSVLLFEVLFY

SEQ ID NO: 4343 - protein, 20 aa, Homo sapiens
KRASQYSGQLKVLIAENTML

SEQ ID NO: 4344 - protein, 20 aa, Homo sapiens
WTLSRFFSYLRSWDVDDLLL

SEQ ID NO: 4345 - protein, 20 aa, Homo sapiens
GDGPYSTFLTSSPIRSRSPP

SEQ ID NO: 4346 - protein, 20 aa, Homo sapiens
NDQESSQPVGSVIVQEPTEE

SEQ ID NO: 4347 - protein, 20 aa, Homo sapiens
MSARVRSRSRGRGDGQEAPD

SEQ ID NO: 4348 - protein, 20 aa, Homo sapiens
RGNDQESSQPVGPVIVQQPT

SEQ ID NO: 4349 - protein, 20 aa, Homo sapiens
NHPVRFLQAQPIVPVQRAAE

SEQ ID NO: 4350 - protein, 20 aa, Homo sapiens
LVGRNFYDPTSAMVLQQHRL

SEQ ID NO: 4351 - protein, 20 aa, Homo sapiens
TKFKQSRAMNFDFPFKKGSG

SEQ ID NO: 4352 - protein, 20 aa, Homo sapiens
QLEPDYFKDMTPTIRKTQKI

SEQ ID NO: 4353 - protein, 20 aa, Homo sapiens
KELEELRAAFTRALEYLKQE

SEQ ID NO: 4354 - protein, 20 aa, Homo sapiens
NNNIEKMITAFEELRVQAEN

SEQ ID NO: 4355 - protein, 20 aa, Homo sapiens
METQQQEIASVRKSLQSMLF

SEQ ID NO: 4356 - protein, 20 aa, Homo sapiens
EISILQEQISHLQFVIHSQH

SEQ ID NO: 4357 - protein, 20 aa, Homo sapiens
KEEVAAVKIQAAFRGHIARE

SEQ ID NO: 4358 - protein, 20 aa, Homo sapiens
EKDPSLVYQHLLYLSKAERF

SEQ ID NO: 4359 - protein, 20 aa, Homo sapiens
NPLQMEEEEFMEIMVEIPAK

SEQ ID NO: 4360 - protein, 20 aa, Homo sapiens
EKISYVYMKRNYKAMTKLGF

SEQ ID NO: 4361 - protein, 20 aa, Homo sapiens
EWEKMKASEKIFYVYMKRKY

SEQ ID NO: 4362 - protein, 20 aa, Homo sapiens
EKIVYVYMKRKYEAMTKLGF

SEQ ID NO: 4363 - protein, 20 aa, Homo sapiens
VERPQMTFGSLQRIFPKIMP

SEQ ID NO: 4364 - protein, 20 aa, Homo sapiens
EKIIYVYMKRKYEAMTKLGF

SEQ ID NO: 4365 - protein, 20 aa, Homo sapiens
EPRVEVLINRINEVQQAKKK

SEQ ID NO: 4366 - protein, 20 aa, Homo sapiens
NLTLKNHFQSVLEQLELQEK

SEQ ID NO: 4367 - protein, 20 aa, Homo sapiens
WAERIMFSDLRSLQLKKTME

SEQ ID NO: 4368 - protein, 20 aa, Homo sapiens
TLQEIFQAENTIMLLERSIM

SEQ ID NO: 4369 - protein, 20 aa, Homo sapiens
TLVELQMMMETIQFIENKKR

SEQ ID NO: 4370 - protein, 20 aa, Homo sapiens
VTKKVVASPRIISLAKPKVR

SEQ ID NO: 4371 - protein, 20 aa, Homo sapiens
VIMHSRYRAQRFWSWVGQAN

SEQ ID NO: 4372 - protein, 20 aa, Homo sapiens
DEDEDMLSYMVSLEVGEEKH

SEQ ID NO: 4373 - protein, 20 aa, Homo sapiens
VAKKGKAVRRGRRGKKGAAT

SEQ ID NO: 4374 - protein, 20 aa, Homo sapiens
KKKNQQLKVGILHLGSRQKK

SEQ ID NO: 4375 - protein, 20 aa, Homo sapiens
PRRSLQPPELIGAMLEPTDE

SEQ ID NO: 4376 - protein, 20 aa, Homo sapiens
KSFKSPKLAKHAAVFSGDKT

SEQ ID NO: 4377 - protein, 20 aa, Homo sapiens
IKVKKLLFSKHLPVFTYTDQ

SEQ ID NO: 4378 - protein, 20 aa, Homo sapiens
SGEKNIFLASFVHEYSRRHP

SEQ ID NO: 4379 - protein, 20 aa, Homo sapiens
SEGIMTYANSVVSDMMVSIM

SEQ ID NO: 4380 - protein, 20 aa, Homo sapiens
DQVNIDYLMNRPQNLRLEMT

SEQ ID NO: 4381 - protein, 20 aa, Homo sapiens
RDKVLIRIMVSRSEVDMLKI

SEQ ID NO: 4382 - protein, 20 aa, Homo sapiens
QARLMKEESPVVSWRLEPED

SEQ ID NO: 4383 - protein, 20 aa, Homo sapiens
QADIEVMSTVHISSVYNDVP

SEQ ID NO: 4384 - protein, 20 aa, Homo sapiens
SRLEKLLTQVRNLQFMSENE

SEQ ID NO: 4385 - protein, 20 aa, Homo sapiens
QTTQNGRFYAISARFKPFSN

SEQ ID NO: 4386 - protein, 20 aa, Homo sapiens
TVFGEKSVITLSSIFTKDLV

SEQ ID NO: 4387 - protein, 20 aa, Homo sapiens
GQKYEKIFEMLEGVQGPTAV

SEQ ID NO: 4388 - protein, 20 aa, Homo sapiens
GNNFIQNFYLPQNYIDQFLL

SEQ ID NO: 4389 - protein, 20 aa, Homo sapiens
TERLLKMKDWAAMLGEDITD

SEQ ID NO: 4390 - protein, 20 aa, Homo sapiens
SVKRGTMVRAARALLSAVTR

SEQ ID NO: 4391 - protein, 20 aa, Homo sapiens
RNGVIDYTIFFTLDSVKLPD

SEQ ID NO: 4392 - protein, 20 aa, Homo sapiens
VKRSLVYYLKNREVRLQNET

SEQ ID NO: 4393 - protein, 20 aa, Homo sapiens
PGQTLIYYVDEKAPEFSMQG

SEQ ID NO: 4394 - protein, 20 aa, Homo sapiens
NRVAYMNPIAMARWRGPTQS

SEQ ID NO: 4395 - protein, 20 aa, Homo sapiens
KNLELKFVSSLRRQFEFSVD

SEQ ID NO: 4396 - protein, 20 aa, Homo sapiens
GENQEHLVIAEMMELGSRSR

SEQ ID NO: 4397 - protein, 20 aa, Homo sapiens
SPQFKKTMSTFHNLVSLNLN

SEQ ID NO: 4398 - protein, 20 aa, Homo sapiens
RPGSRSSNASLEVLSTEPGS

SEQ ID NO: 4399 - protein, 20 aa, Homo sapiens
DDVALENFFRYFLRLSDDKM

SEQ ID NO: 4400 - protein, 20 aa, Homo sapiens
EKDHIFSSYTAFGDLEVFLH

SEQ ID NO: 4401 - protein, 20 aa, Homo sapiens
EQLLQSASMELKFLIIQNAA

SEQ ID NO: 4402 - protein, 20 aa, Homo sapiens
TLIGANASFSIALNFPGSQK

SEQ ID NO: 4403 - protein, 20 aa, Homo sapiens
ATQRDLIATQRDLIVTQRDL

SEQ ID NO: 4404 - protein, 20 aa, Homo sapiens
WAIGLSVMDLVGSILKNLRR

SEQ ID NO: 4405 - protein, 20 aa, Homo sapiens
SEELNIILQGNIILSTEKSK

SEQ ID NO: 4406 - protein, 20 aa, Homo sapiens
RALAETSYVKVLEYVIKVSA

SEQ ID NO: 4407 - protein, 20 aa, Homo sapiens
DGMEHLIYGEPRKLLTQDWV

SEQ ID NO: 4408 - protein, 20 aa, Homo sapiens
YAGREHFLFGEPKRLLTQNW

SEQ ID NO: 4409 - protein, 20 aa, Homo sapiens
PDLETSFQVALSRKMAELVH

SEQ ID NO: 4410 - protein, 20 aa, Homo sapiens
PQGASSFSTTINYTLWRQSD

SEQ ID NO: 4411 - protein, 20 aa, Homo sapiens
ETSYVKVLEHVVRVNARVRI

SEQ ID NO: 4412 - protein, 20 aa, Homo sapiens
EALDEKVAELVRFLLRKYQI

SEQ ID NO: 4413 - protein, 20 aa, Homo sapiens
NSDPPRYQFLWGPRAYAETT

SEQ ID NO: 4414 - protein, 20 aa, Homo sapiens
FPEILKKASEGLSVVFGLEL

SEQ ID NO: 4415 - protein, 20 aa, Homo sapiens
YDGKKHFIFGEPRKLITQDL

SEQ ID NO: 4416 - protein, 20 aa, Homo sapiens
SSSVLRDTASSSLAFGIPQE

SEQ ID NO: 4417 - protein, 20 aa, Homo sapiens
ADIKKQAEIAHLYIASLPDP

SEQ ID NO: 4418 - protein, 20 aa, Homo sapiens
ASPQETQSAFSIPVSTLSSS

SEQ ID NO: 4419 - protein, 20 aa, Homo sapiens
HHIHEQIMEYIRKLSKNHQN

SEQ ID NO: 4420 - protein, 20 aa, Homo sapiens
STNRSMQNYVQFLKSSYANV

SEQ ID NO: 4421 - protein, 20 aa, Homo sapiens
LGQDGRLLSSTLSLSSNRSL

SEQ ID NO: 4422 - protein, 20 aa, Homo sapiens
QAVPAFQGPDMEAFQQELAL

SEQ ID NO: 4423 - protein, 20 aa, Homo sapiens
EDPKDRPSAAHIVEALETDV

SEQ ID NO: 4424 - protein, 20 aa, Homo sapiens
GWEEAYTFEGARYYINHNER

SEQ ID NO: 4425 - protein, 20 aa, Homo sapiens
QKSIAGFVASTNAELTKWYS

SEQ ID NO: 4426 - protein, 20 aa, Homo sapiens
YIPDLASRRLRIALLYSHSE

SEQ ID NO: 4427 - protein, 20 aa, Homo sapiens
DFKRANMDNDIALLLLASPI

SEQ ID NO: 4428 - protein, 20 aa, Homo sapiens
QSGAAVVHEIVRSFGTLKKE

SEQ ID NO: 4429 - protein, 20 aa, Homo sapiens
KNPDFKVFRYSTSLEKHKLF

SEQ ID NO: 4430 - protein, 20 aa, Homo sapiens
ASLEIELSNLKAELLSVKKQ

SEQ ID NO: 4431 - protein, 20 aa, Homo sapiens
AKRKRLEMYTKASLKTSNQK

SEQ ID NO: 4432 - protein, 20 aa, Homo sapiens
DSEFFLTTASGVSVLPQNRS

SEQ ID NO: 4433 - protein, 20 aa, Homo sapiens
MEDNSALYESTSAHIIEETE

SEQ ID NO: 4434 - protein, 20 aa, Homo sapiens
SEPHIKRPMNAFMVWAKDER

SEQ ID NO: 4435 - protein, 20 aa, Homo sapiens
SSEEDKEKEEVAAVKIQAAF

SEQ ID NO: 4436 - protein, 20 aa, Homo sapiens
REEAQKMSSLLPTMWLGAQN

SEQ ID NO: 4437 - protein, 20 aa, Homo sapiens
ESSTILVVRYRRNVKRTSPE

SEQ ID NO: 4438 - protein, 20 aa, Homo sapiens
KGVGLPFLPITSSDIDVVES

SEQ ID NO: 4439 - protein, 20 aa, Homo sapiens
WKKMKYSEKISYVYMKRNYK

SEQ ID NO: 4440 - protein, 20 aa, Homo sapiens
EKIFYVYMKRKYEAMTKLGF

SEQ ID NO: 4441 - protein, 20 aa, Homo sapiens
EWEKMKSSEKIVYVYMKLNY

SEQ ID NO: 4442 - protein, 20 aa, Homo sapiens
EWEKMKASEKIIYVYMKRKY

SEQ ID NO: 4443 - protein, 20 aa, Homo sapiens
KNKQRQLRLAFEEQLEDLMG

SEQ ID NO: 4444 - protein, 20 aa, Homo sapiens
GADAQYFVYSNESVRPYTPF

SEQ ID NO: 4445 - protein, 20 aa, Homo sapiens
GDFYVQLYSSEVLEYMNQLS

SEQ ID NO: 4446 - protein, 20 aa, Homo sapiens
LSQFWEFSETTASTVSTTLH

SEQ ID NO: 4447 - protein, 20 aa, Homo sapiens
KSDIYSFSMIMQEILTDDIP

SEQ ID NO: 4448 - protein, 20 aa, Homo sapiens
LKKSKYFISTYIDFVPYIAS

SEQ ID NO: 4449 - protein, 20 aa, Homo sapiens
DQVDWSRLLRDAGLVKMSRK

SEQ ID NO: 4450 - protein, 20 aa, Homo sapiens
MANERISMQNLEALLVANRD

SEQ ID NO: 4451 - protein, 20 aa, Homo sapiens
LVNITEYRASHSTPIEWYPD

SEQ ID NO: 4452 - protein, 20 aa, Homo sapiens
AVRRGRRGKKGAATKMAAVT

SEQ ID NO: 4453 - protein, 20 aa, Homo sapiens
QLKVGILHLGSRQKKIRIQL

SEQ ID NO: 4454 - protein, 20 aa, Homo sapiens
TPDQKREDDQGAAEIQVPDL

SEQ ID NO: 4455 - protein, 20 aa, Homo sapiens
EVRAGAFEHLPSLRQLDLSH

SEQ ID NO: 4456 - protein, 20 aa, Homo sapiens
PHNFRVYSYSGTGIMKPLDQ

SEQ ID NO: 4457 - protein, 20 aa, Homo sapiens
QKLGEYYLQNAFLVAYTKKA

SEQ ID NO: 4458 - protein, 20 aa, Homo sapiens
DLRSVFFNFIRNLLSETIFK

SEQ ID NO: 4459 - protein, 20 aa, Homo sapiens
LDSQKMDMSNIVLMLIQKLL

SEQ ID NO: 4460 - protein, 20 aa, Homo sapiens
QNKPLYFADRLYDSMKGKGT

SEQ ID NO: 4461 - protein, 20 aa, Homo sapiens
TALDVHFVSTLEPLSNAVKR

SEQ ID NO: 4462 - protein, 20 aa, Homo sapiens
SEILKEMLAKKHFSYAWPFY

SEQ ID NO: 4463 - protein, 20 aa, Homo sapiens
AYFQELTMYRGNTTMDIKDL

SEQ ID NO: 4464 - protein, 20 aa, Homo sapiens
NSPTSLLIYKDAPAFNEKAS

SEQ ID NO: 4465 - protein, 20 aa, Homo sapiens
EEGNEAANFDLAVVARRYPA

SEQ ID NO: 4466 - protein, 20 aa, Homo sapiens
SEAVELQDMSLLSIQQQEGV

SEQ ID NO: 4467 - protein, 20 aa, Homo sapiens
SSDSSMLDSATSLIQAAKNL

SEQ ID NO: 4468 - protein, 20 aa, Homo sapiens
SNSIYFSIAIVSEDFVPYKG

SEQ ID NO: 4469 - protein, 20 aa, Homo sapiens
PHSIARQKRILVNLSMVENK

SEQ ID NO: 4470 - protein, 20 aa, Homo sapiens
DTKEDVFVHQTAIKRNNPRK

SEQ ID NO: 4471 - protein, 20 aa, Homo sapiens
GSEWSVYAVGSQAHVSFLDP

SEQ ID NO: 4472 - protein, 20 aa, Homo sapiens
GIMGQFSHHNIIRLEGVISK

SEQ ID NO: 4473 - protein, 20 aa, Homo sapiens
RGPTQSVGPTIQDYLNRPRP

SEQ ID NO: 4474 - protein, 20 aa, Homo sapiens
SAKRVWNMTATRPKKMGSQL

SEQ ID NO: 4475 - protein, 20 aa, Homo sapiens
WRNSIRSSFISSLSFFLKKM

SEQ ID NO: 4476 - protein, 20 aa, Homo sapiens
RESLKMRVSKPFGMLMLSIW

SEQ ID NO: 4477 - protein, 20 aa, Homo sapiens
EEEDTFSSVFHTQIPPEEYE

SEQ ID NO: 4478 - protein, 20 aa, Homo sapiens
LSMAFYFNRDDVALENFFRY

SEQ ID NO: 4479 - protein, 20 aa, Homo sapiens
SMELKFLIIQNAAVFQEAFE

SEQ ID NO: 4480 - protein, 20 aa, Homo sapiens
AHSSSAFTITDQVPFSVSVS

SEQ ID NO: 4481 - protein, 20 aa, Homo sapiens
GAGKGKYYAVNYPLRDGIDD

SEQ ID NO: 4482 - protein, 20 aa, Homo sapiens
RGHYERILNPYNLFLSGDSL

SEQ ID NO: 4483 - protein, 20 aa, Homo sapiens
QHIKQLSRFAGASIKIAPAE

SEQ ID NO: 4484 - protein, 20 aa, Homo sapiens
AELVRRILSRDAAPLPRPGA

SEQ ID NO: 4485 - protein, 20 aa, Homo sapiens
NLDSARFRYLIGEKLGVHPT

SEQ ID NO: 4486 - protein, 20 aa, Homo sapiens
PDKTMMDGSFSFKLLNQLGM

SEQ ID NO: 4487 - protein, 20 aa, Homo sapiens
FPEIFGKASESLQLVFGIDV

SEQ ID NO: 4488 - protein, 20 aa, Homo sapiens
QDFFPVIFSKASEYLQLVFG

SEQ ID NO: 4489 - protein, 20 aa, Homo sapiens
NKVDELAHFLLRKYRAKELV

SEQ ID NO: 4490 - protein, 20 aa, Homo sapiens
TTEEQEAVSSSSPLVPGTLG

SEQ ID NO: 4491 - protein, 20 aa, Homo sapiens
EEQKAASSSSTLIMGTLEEV

SEQ ID NO: 4492 - protein, 20 aa, Homo sapiens
VIKNYKRYFPVIFGKASEFM

SEQ ID NO: 4493 - protein, 20 aa, Homo sapiens
DNPSGHTYTLVSKLNLTNDG

SEQ ID NO: 4494 - protein, 20 aa, Homo sapiens
PLTRKSGSLVQFLLYKYKIK

SEQ ID NO: 4495 - protein, 20 aa, Homo sapiens
SLTRKTKMLVQFLLYKYKMK

SEQ ID NO: 4496 - protein, 20 aa, Homo sapiens
PVSPSFSSTLVSLFQSSPER

SEQ ID NO: 4497 - protein, 20 aa, Homo sapiens
VFSPSSFSTSSSLILGGPEE

SEQ ID NO: 4498 - protein, 20 aa, Homo sapiens
DDPQKFAMELSIIYKYSPFK

SEQ ID NO: 4499 - protein, 20 aa, Homo sapiens
STEKNAVSMTSSVLSSHSPG

SEQ ID NO: 4500 - protein, 20 aa, Homo sapiens
VQPTQKQQKHRLFHWQANSE

SEQ ID NO: 4501 - protein, 20 aa, Homo sapiens
IWFQNRRYKTKRKQLSSELG

SEQ ID NO: 4502 - protein, 20 aa, Homo sapiens
MKAINFLNQDIRGLTSASQL

SEQ ID NO: 4503 - protein, 20 aa, Homo sapiens
EDSERLMEQQGALLKRLAEA

SEQ ID NO: 4504 - protein, 20 aa, Homo sapiens
EKSTKYVFDSAPSHSISART

SEQ ID NO: 4505 - protein, 20 aa, Homo sapiens
SRVTNNVVLEAPFLVGIEGS

SEQ ID NO: 4506 - protein, 20 aa, Homo sapiens
VYQKRLMDEAKILKSLHHPN

SEQ ID NO: 4507 - protein, 20 aa, Homo sapiens
PTPESSTIASYVTLRKTKKM

SEQ ID NO: 4508 - protein, 20 aa, Homo sapiens
QWALYQYHIDYNPLMEARRL

SEQ ID NO: 4509 - protein, 20 aa, Homo sapiens
RQFVEFTIKEAARFKKVVLI

SEQ ID NO: 4510 - protein, 20 aa, Homo sapiens
DKKTQTFLLETPEIYWKLDS

SEQ ID NO: 4511 - protein, 20 aa, Homo sapiens
QNEFKKEMAMLQKKIMMETQ

SEQ ID NO: 4512 - protein, 20 aa, Homo sapiens
RSIFKPFIFVDDVKLVPKTQ

SEQ ID NO: 4513 - protein, 20 aa, Homo sapiens
LQFVIHSQHQNLRSVIQEME

SEQ ID NO: 4514 - protein, 20 aa, Homo sapiens
GSSLDILSSLNSPALFGDQD

SEQ ID NO: 4515 - protein, 20 aa, Homo sapiens
GSKVEDRFYNNHAFEEQEPP

SEQ ID NO: 4516 - protein, 20 aa, Homo sapiens
RDAVKFFVAVPGQVISPQSS

SEQ ID NO: 4517 - protein, 20 aa, Homo sapiens
TILVVRYRRNVKRTSPEELL

SEQ ID NO: 4518 - protein, 20 aa, Homo sapiens
EWEKMKVSEKIVYVYMKRKY

SEQ ID NO: 4519 - protein, 20 aa, Homo sapiens
TFGSLQRIFPKIMPKKPAEE

SEQ ID NO: 4520 - protein, 20 aa, Homo sapiens
QRQKDLIMKVENLTLKNHFQ

SEQ ID NO: 4521 - protein, 20 aa, Homo sapiens
AEDTRLFAPSIKARFPAETY

SEQ ID NO: 4522 - protein, 20 aa, Homo sapiens
YIEIVMVSETIHFLKNSIAK

SEQ ID NO: 4523 - protein, 20 aa, Homo sapiens
MWMGLIQLVEGVKRKDQGFL

SEQ ID NO: 4524 - protein, 20 aa, Homo sapiens
LNAERSYKSQISTLHKSVVK

SEQ ID NO: 4525 - protein, 20 aa, Homo sapiens
GEEAVLLLDDIMAEVEVVAE

SEQ ID NO: 4526 - protein, 20 aa, Homo sapiens
NSLVSLTYVSFRNLTHLESL

SEQ ID NO: 4527 - protein, 20 aa, Homo sapiens
NFGTRTFQAITVTKLSQKFT

SEQ ID NO: 4528 - protein, 20 aa, Homo sapiens
SVVSDMMVSIMKTLKIQVKD

SEQ ID NO: 4529 - protein, 20 aa, Homo sapiens
SDLQKYALGFQHALSPSTST

SEQ ID NO: 4530 - protein, 20 aa, Homo sapiens
RKYGKSLYYYIQQDTKGDYQ

SEQ ID NO: 4531 - protein, 20 aa, Homo sapiens
LKDLWKHSFSWPFQRPVDAV

SEQ ID NO: 4532 - protein, 20 aa, Homo sapiens
DQSDVLMVDVATSMPVVIKE

SEQ ID NO: 4533 - protein, 20 aa, Homo sapiens
KITKQQVFIDVINKLKENVE

SEQ ID NO: 4534 - protein, 20 aa, Homo sapiens
FSNKGKTLVIQYTVKHEQKM

SEQ ID NO: 4535 - protein, 20 aa, Homo sapiens
ELHKRTEIIRSLTKKVKALE

SEQ ID NO: 4536 - protein, 20 aa, Homo sapiens
AKRTSRFLSGIINFIHFREA

SEQ ID NO: 4537 - protein, 20 aa, Homo sapiens
AGDSLIAGSAMSKAKKLMTG

SEQ ID NO: 4538 - protein, 20 aa, Homo sapiens
PSSETRAFLSPPTLLEGPLR

SEQ ID NO: 4539 - protein, 20 aa, Homo sapiens
DLSRDILNNFPHSIARQKRI

SEQ ID NO: 4540 - protein, 20 aa, Homo sapiens
EVRLQNETSYSRVLHGYAAQ

SEQ ID NO: 4541 - protein, 20 aa, Homo sapiens
GLTGLQSLLQGFSRLFLKGN

SEQ ID NO: 4542 - protein, 20 aa, Homo sapiens
VDDEESVILTLVPVKDDANM

SEQ ID NO: 4543 - protein, 20 aa, Homo sapiens
KQLENKKTGSKALAEFEEKM

SEQ ID NO: 4544 - protein, 20 aa, Homo sapiens
PVFPQLSRSIISKLLNESET

SEQ ID NO: 4545 - protein, 20 aa, Homo sapiens
GWEIGYLDRTSQKLKRLLPI

SEQ ID NO: 4546 - protein, 20 aa, Homo sapiens
FPKNSSFNPAALSRHMSSLS

SEQ ID NO: 4547 - protein, 20 aa, Homo sapiens
KHINQLLRTMSMPKGRVLDK

SEQ ID NO: 4548 - protein, 20 aa, Homo sapiens
DRQTVMTSATWPHSVHRLAQ

SEQ ID NO: 4549 - protein, 20 aa, Homo sapiens
GAGKGKYYAVNFPMRDGIDD

SEQ ID NO: 4550 - protein, 20 aa, Homo sapiens
PNHPSRKKVNFLDMSLDDII

SEQ ID NO: 4551 - protein, 20 aa, Homo sapiens
SSDNNTLTSSNAYNSRYWSN

SEQ ID NO: 4552 - protein, 20 aa, Homo sapiens
TLDDLYPMMNALKLRAESYN

SEQ ID NO: 4553 - protein, 20 aa, Homo sapiens
EAQDIKFTEEIPLKILAHNN

SEQ ID NO: 4554 - protein, 20 aa, Homo sapiens
TSGKDYSVSANSRIVIVTAG

SEQ ID NO: 4555 - protein, 20 aa, Homo sapiens
PSKGRRWAARAPSTRITYGT

SEQ ID NO: 4556 - protein, 20 aa, Homo sapiens
DDTTAMASASSSATGSFSYP

SEQ ID NO: 4557 - protein, 20 aa, Homo sapiens
EEQEAAFFSSTLNVGTLEEL

SEQ ID NO: 4558 - protein, 20 aa, Homo sapiens
DGREDSVFAHPRKLLTQDLV

SEQ ID NO: 4559 - protein, 20 aa, Homo sapiens
PDLESEFQAALSRKVAELVH

SEQ ID NO: 4560 - protein, 20 aa, Homo sapiens
AIPTAIDFTLWRQSIKGSSN

SEQ ID NO: 4561 - protein, 20 aa, Homo sapiens
FPVIFSKASDSLQLVFGIEL

SEQ ID NO: 4562 - protein, 20 aa, Homo sapiens
RTTATTFRARSRAPFSRSSH

SEQ ID NO: 4563 - protein, 20 aa, Homo sapiens
TVPSAFQFWYEEALRDEEER

SEQ ID NO: 4564 - protein, 20 aa, Homo sapiens
NSDPPRYQFLWGPRAHAETS

SEQ ID NO: 4565 - protein, 20 aa, Homo sapiens
ISRYTGYFPVIFRKAREFIE

SEQ ID NO: 4566 - protein, 20 aa, Homo sapiens
DSESSFTYTLDEKVAELVEF

SEQ ID NO: 4567 - protein, 20 aa, Homo sapiens
STTHSFLFGALAELLDNARD

SEQ ID NO: 4568 - protein, 20 aa, Homo sapiens
SSKKTYSLRSQASIIGVNLA

SEQ ID NO: 4569 - protein, 20 aa, Homo sapiens
LQRDISEMFLQIYKQGGFLG

SEQ ID NO: 4570 - protein, 20 aa, Homo sapiens
HRLFHWQANSERADIPASLR

SEQ ID NO: 4571 - protein, 20 aa, Homo sapiens
EKNEEIFNYNNHLKNRIYQY

SEQ ID NO: 4572 - protein, 20 aa, Homo sapiens
AMPFATPMEAELARRSLAQD

SEQ ID NO: 4573 - protein, 20 aa, Homo sapiens
LELEIIVLNDRVTDLVNQQQ

SEQ ID NO: 4574 - protein, 20 aa, Homo sapiens
IILKVALNMARGLKYLHQEK

SEQ ID NO: 4575 - protein, 20 aa, Homo sapiens
VTPAMGMQMRKAIMIEVDDR

SEQ ID NO: 4576 - protein, 20 aa, Homo sapiens
ETFKAVLDGLDVLLAQEVRP

SEQ ID NO: 4577 - protein, 20 aa, Homo sapiens
KNSVKTDLMKAPMVIMDWEE

SEQ ID NO: 4578 - protein, 20 aa, Homo sapiens
STNEVTRIYNVIGTLRGAVE

SEQ ID NO: 4579 - protein, 20 aa, Homo sapiens
VVRLSSYSSPTLQSVLGSGT

SEQ ID NO: 4580 - protein, 20 aa, Homo sapiens
MTPTIRKTQKIVIKKREPLN

SEQ ID NO: 4581 - protein, 20 aa, Homo sapiens
HDLEIQLTAITTSEQYYSKE

SEQ ID NO: 4582 - protein, 20 aa, Homo sapiens
KILQQSRIVQSQRLKTIKQL

SEQ ID NO: 4583 - protein, 20 aa, Homo sapiens
RRHELYKAHEWARAIIESDQ

SEQ ID NO: 4584 - protein, 20 aa, Homo sapiens
IEETEYVKKIRTTLQKIRTQ

SEQ ID NO: 4585 - protein, 20 aa, Homo sapiens
IGEYKQLMRSRRQEMRQFFT

SEQ ID NO: 4586 - protein, 20 aa, Homo sapiens
SMKPLLRRAMAYETLEQYGK

SEQ ID NO: 4587 - protein, 20 aa, Homo sapiens
EDGRVQAFGWSLPQKYKQVT

SEQ ID NO: 4588 - protein, 20 aa, Homo sapiens
HRLRERKQLVIYEEISDPEE

SEQ ID NO: 4589 - protein, 20 aa, Homo sapiens
AMTKLGFKAILPSFMRNKRV

SEQ ID NO: 4590 - protein, 20 aa, Homo sapiens
GKHAWTHRLRERKQLVVYEE

SEQ ID NO: 4591 - protein, 20 aa, Homo sapiens
ATLPPFMRNKRVADFQGNDF

SEQ ID NO: 4592 - protein, 20 aa, Homo sapiens
TNNKKKEFEETAKKVRRAIE

SEQ ID NO: 4593 - protein, 20 aa, Homo sapiens
DQMWRQFTDTNLAFNARISE

SEQ ID NO: 4594 - protein, 20 aa, Homo sapiens
VTELEYNYNQFSTLLKNVMS

SEQ ID NO: 4595 - protein, 20 aa, Homo sapiens
MPMSEVSQVSRAAQMAVPSS

SEQ ID NO: 4596 - protein, 20 aa, Homo sapiens
DAGLVKMSRKPRASSPLSNN

SEQ ID NO: 4597 - protein, 20 aa, Homo sapiens
FWANVIANHPQMSALITDED

SEQ ID NO: 4598 - protein, 20 aa, Homo sapiens
ADASQSSMHNALHIYMNGTM

SEQ ID NO: 4599 - protein, 20 aa, Homo sapiens
WRGRSTYRPRPRRSLQPPEL

SEQ ID NO: 4600 - protein, 20 aa, Homo sapiens
FSGSNASVSAPSPLVELILN

SEQ ID NO: 4601 - protein, 20 aa, Homo sapiens
NRNVNFAMKSETKLREKMYS

SEQ ID NO: 4602 - protein, 20 aa, Homo sapiens
SKGLMVYANQVASDMMVSLM

SEQ ID NO: 4603 - protein, 20 aa, Homo sapiens
VGTIDMTLQSDIMTMFENNF

SEQ ID NO: 4604 - protein, 20 aa, Homo sapiens
SKPRLVVPYGLKTLLEGISR

SEQ ID NO: 4605 - protein, 20 aa, Homo sapiens
NNIENYSTNALIQPVDTISI

SEQ ID NO: 4606 - protein, 20 aa, Homo sapiens
ESGSIEYDWNLTSLKKETSP

SEQ ID NO: 4607 - protein, 20 aa, Homo sapiens
DKELNDMVAVHQQQLLSWEE

SEQ ID NO: 4608 - protein, 20 aa, Homo sapiens
VGEVSTPFHIFKVKVTTERE

SEQ ID NO: 4609 - protein, 20 aa, Homo sapiens
LGEEEGEQAAGLAAVPRGGS

SEQ ID NO: 4610 - protein, 20 aa, Homo sapiens
RGSQKKHISPVQALSEFKAM

SEQ ID NO: 4611 - protein, 20 aa, Homo sapiens
IDESIYFSSDVVTGNVPLKV

SEQ ID NO: 4612 - protein, 20 aa, Homo sapiens
HQTAIKRNNPRKFLRSVGDG

SEQ ID NO: 4613 - protein, 20 aa, Homo sapiens
SRLSPRKTHLLYILRPSRQL

SEQ ID NO: 4614 - protein, 20 aa, Homo sapiens
QSVPQFFTFEDAPSYPEARA

SEQ ID NO: 4615 - protein, 20 aa, Homo sapiens
QKEITTRYQLDPKFITSILY

SEQ ID NO: 4616 - protein, 20 aa, Homo sapiens
EFNVLEMEVMRRQLYAVNRR

SEQ ID NO: 4617 - protein, 20 aa, Homo sapiens
KRPSFLDDPLYGISVSLSSE

SEQ ID NO: 4618 - protein, 20 aa, Homo sapiens
KNVNQSLLDLYQLAVEKGDP

SEQ ID NO: 4619 - protein, 20 aa, Homo sapiens
MSSTDKVIVFVSRKAVADHL

SEQ ID NO: 4620 - protein, 20 aa, Homo sapiens
GDLVDTQSDLIATQRDLIAT

SEQ ID NO: 4621 - protein, 20 aa, Homo sapiens
PYSAVEKAMARLQELLTVSE

SEQ ID NO: 4622 - protein, 20 aa, Homo sapiens
ITMPFSSPMEAELVRRILSR

SEQ ID NO: 4623 - protein, 20 aa, Homo sapiens
LKGEMMDLQHGSLFFSTSKI

SEQ ID NO: 4624 - protein, 20 aa, Homo sapiens
LQGNIILSTEKSKKLKKWPE

SEQ ID NO: 4625 - protein, 20 aa, Homo sapiens
EESFSPTAMDAIFGSLSDEG

SEQ ID NO: 4626 - protein, 20 aa, Homo sapiens
PDLESEFQAALSRKVAKLVH

SEQ ID NO: 4627 - protein, 20 aa, Homo sapiens
VRVNARVRISYPSLHEEALG

SEQ ID NO: 4628 - protein, 20 aa, Homo sapiens
MHFILRKYKMREPIMKADML

SEQ ID NO: 4629 - protein, 20 aa, Homo sapiens
KIVGKRFREHFPEILKKASE

SEQ ID NO: 4630 - protein, 20 aa, Homo sapiens
VQFLMEMYKMKKPIMKADML

SEQ ID NO: 4631 - protein, 20 aa, Homo sapiens
DEESVSASQKAIIFKRLSKD

SEQ ID NO: 4632 - protein, 20 aa, Homo sapiens
PRELLTKVWVQGHYLEYREV

SEQ ID NO: 4633 - protein, 20 aa, Homo sapiens
EKPLNSFQYQRRQAMGIPFI

SEQ ID NO: 4634 - protein, 20 aa, Homo sapiens
KFSVWVSFFEIYNEYIYDLF

SEQ ID NO: 4635 - protein, 20 aa, Homo sapiens
NGGSSLSYTNPAVAAASANL

SEQ ID NO: 4636 - protein, 20 aa, Homo sapiens
QPERLLFVIDSFEELQGGLN

SEQ ID NO: 4637 - protein, 20 aa, Homo sapiens
QEMVQAFSAQSGMKLEWSQK

SEQ ID NO: 4638 - protein, 20 aa, Homo sapiens
ITKRSEQIVEFLLIKNANAN

SEQ ID NO: 4639 - protein, 20 aa, Homo sapiens
ADSVHLAWDLSRSLGAVVFS

SEQ ID NO: 4640 - protein, 20 aa, Homo sapiens
WQQRQFYNKQSTLPRHSTLS

SEQ ID NO: 4641 - protein, 20 aa, Homo sapiens
ESVGLVSMFRGLGIETVSKT

SEQ ID NO: 4642 - protein, 20 aa, Homo sapiens
QENPAAFVRAIQQYVDPDVQ

SEQ ID NO: 4643 - protein, 20 aa, Homo sapiens
KAVSQDMVIYSTEIHYSSKG

SEQ ID NO: 4644 - protein, 20 aa, Homo sapiens
DNDIALLLLASPIKLDDLKV

SEQ ID NO: 4645 - protein, 20 aa, Homo sapiens
EIQALRRLNPHPNILMLHEV

SEQ ID NO: 4646 - protein, 20 aa, Homo sapiens
EEEEDAAWQAEEVLRQQKLA

SEQ ID NO: 4647 - protein, 20 aa, Homo sapiens
FIQATDYVEIWQAYLDYLRR

SEQ ID NO: 4648 - protein, 20 aa, Homo sapiens
MEESNKARAAHSFVVTEFET

SEQ ID NO: 4649 - protein, 20 aa, Homo sapiens
RLKTIKQLYEQFIKSMEELE

SEQ ID NO: 4650 - protein, 20 aa, Homo sapiens
GETAKEALDVIVSLLEEHGQ

SEQ ID NO: 4651 - protein, 20 aa, Homo sapiens
EAGAAALRNVAQRLFENYQT

SEQ ID NO: 4652 - protein, 20 aa, Homo sapiens
ISGKEEETSVTILDSSEEDK

SEQ ID NO: 4653 - protein, 20 aa, Homo sapiens
IDVVESEAVSVLHHWLKKTE

SEQ ID NO: 4654 - protein, 20 aa, Homo sapiens
QGIRNLVTDAKFVLIVEKDA

SEQ ID NO: 4655 - protein, 20 aa, Homo sapiens
EKRSKAFDDIATYFSKKEWK

SEQ ID NO: 4656 - protein, 20 aa, Homo sapiens
GFKAILPSFMRNKRVTDFQG

SEQ ID NO: 4657 - protein, 20 aa, Homo sapiens
ISEKLRKAFDDIAKYFSKKE

SEQ ID NO: 4658 - protein, 20 aa, Homo sapiens
HRVRERKQLVIYEEISDPQE

SEQ ID NO: 4659 - protein, 20 aa, Homo sapiens
QALAPDFRLNPVRRLIPAAR

SEQ ID NO: 4660 - protein, 20 aa, Homo sapiens
IMLLKNFMLNQNVMLSVKGI

SEQ ID NO: 4661 - protein, 20 aa, Homo sapiens
DNIKHSQNMRANSIQLREEA

SEQ ID NO: 4662 - protein, 20 aa, Homo sapiens
PKIRDNFWSMPMSEVSQVSR

SEQ ID NO: 4663 - protein, 20 aa, Homo sapiens
HNALHIYMNGTMSQVQGSAN

SEQ ID NO: 4664 - protein, 20 aa, Homo sapiens
DLERGTDEAVLQVQAHEHGQ

SEQ ID NO: 4665 - protein, 20 aa, Homo sapiens
GLGGLRMDSNFDSLPVQITV

SEQ ID NO: 4666 - protein, 20 aa, Homo sapiens
EIKPLAFSTTFEHLVYKMDS

SEQ ID NO: 4667 - protein, 20 aa, Homo sapiens
ASFVHEYSRRHPQLAVSVIL

SEQ ID NO: 4668 - protein, 20 aa, Homo sapiens
DDFTASVSEGIMTYANSVVS

SEQ ID NO: 4669 - protein, 20 aa, Homo sapiens
SDTSGDFRKLMVALAKGRRA

SEQ ID NO: 4670 - protein, 20 aa, Homo sapiens
VDAVKLQLPDYYTIIKNPMD

SEQ ID NO: 4671 - protein, 20 aa, Homo sapiens
TMYRGNTTMDIKDLVKQFHQ

SEQ ID NO: 4672 - protein, 20 aa, Homo sapiens
SRQMVTDLELSTLLPISHEN

SEQ ID NO: 4673 - protein, 20 aa, Homo sapiens
TLSFPRYNVAEIVIHIRNKI

SEQ ID NO: 4674 - protein, 20 aa, Homo sapiens
AMSKAKKLMTGHAIPPSQLD

SEQ ID NO: 4675 - protein, 20 aa, Homo sapiens
DALQKKYLRMVVLAVYTNPE

SEQ ID NO: 4676 - protein, 20 aa, Homo sapiens
LTERLLKMKDGVAMLEEDVT

SEQ ID NO: 4677 - protein, 20 aa, Homo sapiens
SKSLKSQVAEAKMTFKIFQM

SEQ ID NO: 4678 - protein, 20 aa, Homo sapiens
KSDLRVHMRNLHAYSAAELK

SEQ ID NO: 4679 - protein, 20 aa, Homo sapiens
FGKEMVKLNYVAARRQQELK

SEQ ID NO: 4680 - protein, 20 aa, Homo sapiens
KRILVNLSMVENKLVELEHT

SEQ ID NO: 4681 - protein, 20 aa, Homo sapiens
NRRKSRRFIPRPPSVAPPPM

SEQ ID NO: 4682 - protein, 20 aa, Homo sapiens
LQGFSRLFLKGNLLRGIDSL

SEQ ID NO: 4683 - protein, 20 aa, Homo sapiens
ASEGRMVIQDIPAVTSRGHV

SEQ ID NO: 4684 - protein, 20 aa, Homo sapiens
PGHQKRIAYSLLGLKDQVNT

SEQ ID NO: 4685 - protein, 20 aa, Homo sapiens
LDPMLDFYSDKNAKLTKESY

SEQ ID NO: 4686 - protein, 20 aa, Homo sapiens
PGTDAVAQTSLEEFNVLEME

SEQ ID NO: 4687 - protein, 20 aa, Homo sapiens
AIQKMKKLDKILAKKQRREK

SEQ ID NO: 4688 - protein, 20 aa, Homo sapiens
HFLESHYLHEQVKTIKELGG

SEQ ID NO: 4689 - protein, 20 aa, Homo sapiens
EKIKQRLFENLRMLPHAPGV

SEQ ID NO: 4690 - protein, 20 aa, Homo sapiens
TIFENLKMLNHAPSVQIHDV

SEQ ID NO: 4691 - protein, 20 aa, Homo sapiens
PSQKPSGFKSGQHPLNGQPL

SEQ ID NO: 4692 - protein, 20 aa, Homo sapiens
GSETWKTIITKNLHYKDGFD

SEQ ID NO: 4693 - protein, 20 aa, Homo sapiens
IEEIPAYLPNGAALKDSVQR

SEQ ID NO: 4694 - protein, 20 aa, Homo sapiens
DVGYGRSISSSSSLRRSSKE

SEQ ID NO: 4695 - protein, 20 aa, Homo sapiens
SRGATTFIYNRAVKNTRKVA

SEQ ID NO: 4696 - protein, 20 aa, Homo sapiens
PRAHAEIRKMSLLKFLAKVN

SEQ ID NO: 4697 - protein, 20 aa, Homo sapiens
VKGLITKAEMLGSVIKNYED

SEQ ID NO: 4698 - protein, 20 aa, Homo sapiens
EEQEAASSSSTLVEVTLGEV

SEQ ID NO: 4699 - protein, 20 aa, Homo sapiens
EERAQVRSSVRARRRTTATT

SEQ ID NO: 4700 - protein, 20 aa, Homo sapiens
IEKKQSFSQGLSSTVQSRTD

SEQ ID NO: 4701 - protein, 20 aa, Homo sapiens
FPEIFRKVSQRTELVFGLAL

SEQ ID NO: 4702 - protein, 20 aa, Homo sapiens
SLLQIPMTSSFSSTLLSIFQ

SEQ ID NO: 4703 - protein, 20 aa, Homo sapiens
TSPQLSTGVSFFFLSFHISN

SEQ ID NO: 4704 - protein, 20 aa, Homo sapiens
TETQVKIWFQNRRYKTKRKQ

SEQ ID NO: 4705 - protein, 20 aa, Homo sapiens
MQDPAFVKQAVNLLQEANFH

SEQ ID NO: 4706 - protein, 20 aa, Homo sapiens
QMEMLKLTMNKRYNVSQQAL

SEQ ID NO: 4707 - protein, 20 aa, Homo sapiens
AQRKSKSLKINLNYAGDALR

SEQ ID NO: 4708 - protein, 20 aa, Homo sapiens
ATSAQNIEFLQVIAKREEAI

SEQ ID NO: 4709 - protein, 20 aa, Homo sapiens
PINIWIFELERNVSIPIGWS

SEQ ID NO: 4710 - protein, 20 aa, Homo sapiens
THNRLKSLMKILSEVTPDQS

SEQ ID NO: 4711 - protein, 20 aa, Homo sapiens
SQEIEMHADNPAAIQTVVLQ

SEQ ID NO: 4712 - protein, 20 aa, Homo sapiens
YNPLMEARRLRSALLFQHED

SEQ ID NO: 4713 - protein, 20 aa, Homo sapiens
FGERHIFDGNSLLLSRPLKE

SEQ ID NO: 4714 - protein, 20 aa, Homo sapiens
SNKAKAFDGAILFLSQKLEE

SEQ ID NO: 4715 - protein, 20 aa, Homo sapiens
LKKEGWRPRRTILFASWDAE

SEQ ID NO: 4716 - protein, 20 aa, Homo sapiens
QQRKKMEKEAQRLMKKEQNK

SEQ ID NO: 4717 - protein, 20 aa, Homo sapiens
EKVHSLFRRQLAIPLYDMEA

SEQ ID NO: 4718 - protein, 20 aa, Homo sapiens
EQEQSSLRASLEIELSNLKA

SEQ ID NO: 4719 - protein, 20 aa, Homo sapiens
NLLTGAQNEFKKEMAMLQKK

SEQ ID NO: 4720 - protein, 20 aa, Homo sapiens
ERKLSLENKLLQLKSSATYG

SEQ ID NO: 4721 - protein, 20 aa, Homo sapiens
SYNHKQIEQLYAAQLASMQV

SEQ ID NO: 4722 - protein, 20 aa, Homo sapiens
REILREQPDNIPAFAAAYFE

SEQ ID NO: 4723 - protein, 20 aa, Homo sapiens
HLSKSDLLANQSQEVLEERT

SEQ ID NO: 4724 - protein, 20 aa, Homo sapiens
ASIENIIQDIITSLARNEAP

SEQ ID NO: 4725 - protein, 20 aa, Homo sapiens
GKHAWTHRLRERKQLVIYEE

SEQ ID NO: 4726 - protein, 20 aa, Homo sapiens
QIPEKIQKAFDDIAKYFSKE

SEQ ID NO: 4727 - protein, 20 aa, Homo sapiens
KYFSEKEWEKMKASEKIIYV

SEQ ID NO: 4728 - protein, 20 aa, Homo sapiens
AEGPSTLDEGLFLRSQEAAA

SEQ ID NO: 4729 - protein, 20 aa, Homo sapiens
DADSSAQAAAQAPENFQEGK

SEQ ID NO: 4730 - protein, 20 aa, Homo sapiens
VSREAILRFGFLQEFSKEER

SEQ ID NO: 4731 - protein, 20 aa, Homo sapiens
GGAESERGLPASTLSRLSNR

SEQ ID NO: 4732 - protein, 20 aa, Homo sapiens
GFWKSELSYELDRLLTENQN

SEQ ID NO: 4733 - protein, 20 aa, Homo sapiens
ALKSRISWEGLLALDNGEME

SEQ ID NO: 4734 - protein, 20 aa, Homo sapiens
RPKRFYLEYYNNNRTTPVWP

SEQ ID NO: 4735 - protein, 20 aa, Homo sapiens
VLGEAWRDQVDWSRLLRDAG

SEQ ID NO: 4736 - protein, 20 aa, Homo sapiens
SDVPVLQVIMHSRYRAQRFW

SEQ ID NO: 4737 - protein, 20 aa, Homo sapiens
FKWNSDFINHQIIYAGEKNH

SEQ ID NO: 4738 - protein, 20 aa, Homo sapiens
LRHLDLSNNSLVSLTYVSFR

SEQ ID NO: 4739 - protein, 20 aa, Homo sapiens
KTLEFAGQDLSAYLLKSLFK

SEQ ID NO: 4740 - protein, 20 aa, Homo sapiens
YKEVSKMVKDALTAIEKPTG

SEQ ID NO: 4741 - protein, 20 aa, Homo sapiens
LMTDTQFVSAVKRTVFSHGS

SEQ ID NO: 4742 - protein, 20 aa, Homo sapiens
PKWISIMTERSVPHLQKVFD

SEQ ID NO: 4743 - protein, 20 aa, Homo sapiens
EVPAQLLDAEGAIKIGSEKS

SEQ ID NO: 4744 - protein, 20 aa, Homo sapiens
EKVSDIMLQKLKSLHLKKKT

SEQ ID NO: 4745 - protein, 20 aa, Homo sapiens
DSRFGHFRLSSGKFYGHKEK

SEQ ID NO: 4746 - protein, 20 aa, Homo sapiens
VEWMSIFKPSKMQRIVRLKS

SEQ ID NO: 4747 - protein, 20 aa, Homo sapiens
SQIDDFTGFSKDRMMQKPGS

SEQ ID NO: 4748 - protein, 20 aa, Homo sapiens
LLEKDPYALDVPNTAFGREH

SEQ ID NO: 4749 - protein, 20 aa, Homo sapiens
NSTALALVRPSSSGLINSNT

SEQ ID NO: 4750 - protein, 20 aa, Homo sapiens
PRMEEKEALVPIQKATDSFH

SEQ ID NO: 4751 - protein, 20 aa, Homo sapiens
TRPKKMGSQLPKPRMLRESG

SEQ ID NO: 4752 - protein, 20 aa, Homo sapiens
MGKRLDYLNLKGARLTVEQG

SEQ ID NO: 4753 - protein, 20 aa, Homo sapiens
LSDDKMEHAQKLMRLQNLRG

SEQ ID NO: 4754 - protein, 20 aa, Homo sapiens
KLESSHSRGSMTALGGASSS

SEQ ID NO: 4755 - protein, 20 aa, Homo sapiens
YYPEDLFIDKKVLKVAHVEH

SEQ ID NO: 4756 - protein, 20 aa, Homo sapiens
NHHSERSRNHLERSLSQSDR

SEQ ID NO: 4757 - protein, 20 aa, Homo sapiens
EGDALRYMIERTVNWQHRAQ

SEQ ID NO: 4758 - protein, 20 aa, Homo sapiens
LDKLNGFQLENFTLKVAYIP

SEQ ID NO: 4759 - protein, 20 aa, Homo sapiens
LLRELDVMNSVIAQLAPEEE

SEQ ID NO: 4760 - protein, 20 aa, Homo sapiens
REGAGRMRVVGWGLGSASPE

SEQ ID NO: 4761 - protein, 20 aa, Homo sapiens
LSTEKSKKLKKWPEASTTKR

SEQ ID NO: 4762 - protein, 20 aa, Homo sapiens
GSIPLWLQNFVRILLNEEDM

SEQ ID NO: 4763 - protein, 20 aa, Homo sapiens
QSPQGASAFPTTINFTRQRQ

SEQ ID NO: 4764 - protein, 20 aa, Homo sapiens
GSVIKNYEDYFPEIFREASV

SEQ ID NO: 4765 - protein, 20 aa, Homo sapiens
KLLTQHFVQENYLEYRQVPG

SEQ ID NO: 4766 - protein, 20 aa, Homo sapiens
TTEEQEAAVSSSSPLVPGTL

SEQ ID NO: 4767 - protein, 20 aa, Homo sapiens
VGKEHMFYGEPRKLLTQDWV

SEQ ID NO: 4768 - protein, 20 aa, Homo sapiens
FWAKVNKTVPSAFQFWYEEA

SEQ ID NO: 4769 - protein, 20 aa, Homo sapiens
EPTTKAEMLKIISKKYKEHF

SEQ ID NO: 4770 - protein, 20 aa, Homo sapiens
IESEPLFTYTLDEKVDELAR

SEQ ID NO: 4771 - protein, 20 aa, Homo sapiens
KKKVLEFLAKLNNTVPSSFP

SEQ ID NO: 4772 - protein, 20 aa, Homo sapiens
AASRYNLTISDVSVSDVPFP

SEQ ID NO: 4773 - protein, 20 aa, Homo sapiens
PTPSKPLTSFLIQDILRDGA

SEQ ID NO: 4774 - protein, 20 aa, Homo sapiens
SSRSVELNGFMAFREQYMGM

SEQ ID NO: 4775 - protein, 20 aa, Homo sapiens
SNLQNNYAHLTNSSINKSGA

SEQ ID NO: 4776 - protein, 20 aa, Homo sapiens
KLVEAEMDGAAAAKQVMALK

SEQ ID NO: 4777 - protein, 20 aa, Homo sapiens
SAPSHSISARTKAFRVDSTP

SEQ ID NO: 4778 - protein, 20 aa, Homo sapiens
AFSKKWLDLSRSLFYQRWPV

SEQ ID NO: 4779 - protein, 20 aa, Homo sapiens
DLNLEWISLPRSWTYGITRG

SEQ ID NO: 4780 - protein, 20 aa, Homo sapiens
NSLIQNLFKVTPAMGMQMRK

SEQ ID NO: 4781 - protein, 20 aa, Homo sapiens
KWYSRVVFQMPHQEIVDSLK

SEQ ID NO: 4782 - protein, 20 aa, Homo sapiens
LHSWLILYSRSSHREAMSLK

SEQ ID NO: 4783 - protein, 20 aa, Homo sapiens
QLTTLSFYGNSISISALQSL

SEQ ID NO: 4784 - protein, 20 aa, Homo sapiens
EMKTYSVSFDSLFSAVKNFT

SEQ ID NO: 4785 - protein, 20 aa, Homo sapiens
PAPDNVLLTLRPRRINMTDT

SEQ ID NO: 4786 - protein, 20 aa, Homo sapiens
KDKRDYLWTSAKNTLSTPLP

SEQ ID NO: 4787 - protein, 20 aa, Homo sapiens
QEEKILNMFRQQQKILQQSR

SEQ ID NO: 4788 - protein, 20 aa, Homo sapiens
DQEQGRKLRSTMLELEKQGL

SEQ ID NO: 4789 - protein, 20 aa, Homo sapiens
KKIRTTLQKIRTQMFKDEIR

SEQ ID NO: 4790 - protein, 20 aa, Homo sapiens
QSSGISFQSKYLSFFILGQT

SEQ ID NO: 4791 - protein, 20 aa, Homo sapiens
TPNNHFTLEDIQALKRQYEL

SEQ ID NO: 4792 - protein, 20 aa, Homo sapiens
GYRNKIYVVQPKAMKIEKSF

SEQ ID NO: 4793 - protein, 20 aa, Homo sapiens
EMTEDIMRDRIEQVRRSISR

SEQ ID NO: 4794 - protein, 20 aa, Homo sapiens
YATKRDIYYTDSQLFGNQTV

SEQ ID NO: 4795 - protein, 20 aa, Homo sapiens
MNGDDAFARRPTVGAQIPEK

SEQ ID NO: 4796 - protein, 20 aa, Homo sapiens
MNGDDTFARRPTVGAQIPEK

SEQ ID NO: 4797 - protein, 20 aa, Homo sapiens
VTLPPFMRSKRAADFHGNDF

SEQ ID NO: 4798 - protein, 20 aa, Homo sapiens
RGKHAWTHRVRERKQLVIYE

SEQ ID NO: 4799 - protein, 20 aa, Homo sapiens
VHLKEILSKKQETLRILRLH

SEQ ID NO: 4800 - protein, 20 aa, Homo sapiens
LGVTKEIAIWAERIMFSDLR

SEQ ID NO: 4801 - protein, 20 aa, Homo sapiens
LVNEVFTIDDTLQTLKLRLR

SEQ ID NO: 4802 - protein, 20 aa, Homo sapiens
YGLEHIFFDAAKNLVWKERT

SEQ ID NO: 4803 - protein, 20 aa, Homo sapiens
PSTTMTKARKRRRRRRLMEL

SEQ ID NO: 4804 - protein, 20 aa, Homo sapiens
KARQSEADNNTLKLELITAE

SEQ ID NO: 4805 - protein, 20 aa, Homo sapiens
HHNSSLNFFNWFSDHNFAGS

SEQ ID NO: 4806 - protein, 20 aa, Homo sapiens
QDFAKYIEMHVIVEKQLYNH

SEQ ID NO: 4807 - protein, 20 aa, Homo sapiens
DSEEKQFSTMRSGFMQNEIT

SEQ ID NO: 4808 - protein, 20 aa, Homo sapiens
KQLQAVLQWVAASELNVPIL

SEQ ID NO: 4809 - protein, 20 aa, Homo sapiens
MTDSDFVSAVKRNLFNQWKQ

SEQ ID NO: 4810 - protein, 20 aa, Homo sapiens
RYKSYSPYDMLESIRKEVKG

SEQ ID NO: 4811 - protein, 20 aa, Homo sapiens
LKAVHQQLQVLSQVPFRKLN

SEQ ID NO: 4812 - protein, 20 aa, Homo sapiens
AISARFKPFSNKGKTLVIQY

SEQ ID NO: 4813 - protein, 20 aa, Homo sapiens
LHNLRQIYVKQQSDLQFLNF

SEQ ID NO: 4814 - protein, 20 aa, Homo sapiens
EEGEQAAGLAAVPRGGSAEE

SEQ ID NO: 4815 - protein, 20 aa, Homo sapiens
LSGPAELRSFNMPSLDKMDG

SEQ ID NO: 4816 - protein, 20 aa, Homo sapiens
MSGDERSDEIVLTVSNSNVE

SEQ ID NO: 4817 - protein, 20 aa, Homo sapiens
LVYDGVRDIRKAVLMIRTPE

SEQ ID NO: 4818 - protein, 20 aa, Homo sapiens
LEHTLLSKGFRGASPHRKST

SEQ ID NO: 4819 - protein, 20 aa, Homo sapiens
VAFWIIKLPRRRSHQDALEG

SEQ ID NO: 4820 - protein, 20 aa, Homo sapiens
KTQNDVDIADVAYYFEKDVK

SEQ ID NO: 4821 - protein, 20 aa, Homo sapiens
IVKDARLNGSVASYILASHN

SEQ ID NO: 4822 - protein, 20 aa, Homo sapiens
LQEYAGNFQGIRFHYDRNPG

SEQ ID NO: 4823 - protein, 20 aa, Homo sapiens
EMENTKKFLSLTAVSEETVG

SEQ ID NO: 4824 - protein, 20 aa, Homo sapiens
VLLGLFSTIHDSIQYVQKNA

SEQ ID NO: 4825 - protein, 20 aa, Homo sapiens
PKASTWVVASRRSSTVSRAP

SEQ ID NO: 4826 - protein, 20 aa, Homo sapiens
NQPEQVILYQGGQMFDGAPR

SEQ ID NO: 4827 - protein, 20 aa, Homo sapiens
KKNSYHFSAGFGSPIEDKSE

SEQ ID NO: 4828 - protein, 20 aa, Homo sapiens
VLKDFTVSGNLLFMSVRDQD

SEQ ID NO: 4829 - protein, 20 aa, Homo sapiens
KLLTQDWVQENYLEYRQVPG

SEQ ID NO: 4830 - protein, 20 aa, Homo sapiens
APEEKIWEELSVLEVFEGRE

SEQ ID NO: 4831 - protein, 20 aa, Homo sapiens
KSPQGASAIPTAIDFTLWRQ

SEQ ID NO: 4832 - protein, 20 aa, Homo sapiens
LRKLLTQEWVQENYLEYRQA

SEQ ID NO: 4833 - protein, 20 aa, Homo sapiens
DHFTEILNGASRRLELVFGL

SEQ ID NO: 4834 - protein, 20 aa, Homo sapiens
KASEGLSVVFGLELNKVNPN

SEQ ID NO: 4835 - protein, 20 aa, Homo sapiens
ILKKASFNMEVVFGVDLKKV

SEQ ID NO: 4836 - protein, 20 aa, Homo sapiens
DTTPNNFPLLYEEALRDEEE

SEQ ID NO: 4837 - protein, 20 aa, Homo sapiens
DSSGESYTLVSKLGLPSEGI

SEQ ID NO: 4838 - protein, 20 aa, Homo sapiens
MIVIKYKDYFPVILKRAREF

SEQ ID NO: 4839 - protein, 20 aa, Homo sapiens
EKQRELKTARTLSLFYGVNV

SEQ ID NO: 4840 - protein, 20 aa, Homo sapiens
TDYYQELQRDISEMFLQIYK

SEQ ID NO: 4841 - protein, 20 aa, Homo sapiens
AETEPERHLGSYLLDSENTS

SEQ ID NO: 4842 - protein, 20 aa, Homo sapiens
RNKSVRYLDLSANVLKDEGL

SEQ ID NO: 4843 - protein, 20 aa, Homo sapiens
RSLDPQSYSLIHQLLSAEDL

SEQ ID NO: 4844 - protein, 20 aa, Homo sapiens
PNDYTKFVAEYFQERQMLGT

SEQ ID NO: 4845 - protein, 20 aa, Homo sapiens
EAELARRSLAQDAPPLPVPG

SEQ ID NO: 4846 - protein, 20 aa, Homo sapiens
SMQNYVQFLKSSYANVFGDG

SEQ ID NO: 4847 - protein, 20 aa, Homo sapiens
DVRVTKFKAPQYTMAARVEP

SEQ ID NO: 4848 - protein, 20 aa, Homo sapiens
LHKEKYTLEQALLSASQEIE

SEQ ID NO: 4849 - protein, 20 aa, Homo sapiens
IYTRRNYEAANSLIQNLFKV

SEQ ID NO: 4850 - protein, 20 aa, Homo sapiens
LVGNIVITRYNNRTYRIDDV

SEQ ID NO: 4851 - protein, 20 aa, Homo sapiens
IRKTQKIVIKKREPLNFGIP

SEQ ID NO: 4852 - protein, 20 aa, Homo sapiens
GAIRKMREDRWAVIAKMDRK

SEQ ID NO: 4853 - protein, 20 aa, Homo sapiens
LQKKIMMETQQQEIASVRKS

SEQ ID NO: 4854 - protein, 20 aa, Homo sapiens
EKEKRTLLERKLSLENKLLQ

SEQ ID NO: 4855 - protein, 20 aa, Homo sapiens
EVLEERTRIQFIRWSHTRIF

SEQ ID NO: 4856 - protein, 20 aa, Homo sapiens
PTGGSRLASSSEVLASIENI

SEQ ID NO: 4857 - protein, 20 aa, Homo sapiens
AFDDIATYFSKKEWKKMKYS

SEQ ID NO: 4858 - protein, 20 aa, Homo sapiens
WEKMKASEKIFYVYMKRKYE

SEQ ID NO: 4859 - protein, 20 aa, Homo sapiens
WEKMKSSEKIVYVYMKLNYE

SEQ ID NO: 4860 - protein, 20 aa, Homo sapiens
NGDDAFVRRPRVGSQIPEKM

SEQ ID NO: 4861 - protein, 20 aa, Homo sapiens
NEGTSSIVMEIQKQIEKKEK

SEQ ID NO: 4862 - protein, 20 aa, Homo sapiens
AAVALVSSSAWSSALGSQTT

SEQ ID NO: 4863 - protein, 20 aa, Homo sapiens
IMLLERSIMAKEGPLKVAQT

SEQ ID NO: 4864 - protein, 20 aa, Homo sapiens
KDRTMNLQDIRYILKNDLKD

SEQ ID NO: 4865 - protein, 20 aa, Homo sapiens
KDLRRHKIYGRKRRLTSQDS

SEQ ID NO: 4866 - protein, 20 aa, Homo sapiens
SEIELLRSQMANERISMQNL

SEQ ID NO: 4867 - protein, 20 aa, Homo sapiens
ESEQAALGEEAVLLLDDIMA

SEQ ID NO: 4868 - protein, 20 aa, Homo sapiens
DSFQDYIKSYLEQASRIWSW

SEQ ID NO: 4869 - protein, 20 aa, Homo sapiens
KIESQRIISGRISGYISEAS

SEQ ID NO: 4870 - protein, 20 aa, Homo sapiens
KLSQKFTKVNFTEIQKLVLD

SEQ ID NO: 4871 - protein, 20 aa, Homo sapiens
DAMLRKLYNVMFAKKVPEHV

SEQ ID NO: 4872 - protein, 20 aa, Homo sapiens
EVDMLKIRSEFKRKYGKSLY

SEQ ID NO: 4873 - protein, 20 aa, Homo sapiens
PSRQTAIIVNPPPPEYINTK

SEQ ID NO: 4874 - protein, 20 aa, Homo sapiens
PAQLAAQMLGKVSSIHSDQS

SEQ ID NO: 4875 - protein, 20 aa, Homo sapiens
TSKLQRLLAESRQMVTDLEL

SEQ ID NO: 4876 - protein, 20 aa, Homo sapiens
LKTEENSFKRLMIVKKEKLA

SEQ ID NO: 4877 - protein, 20 aa, Homo sapiens
SPPASNMLKMEWSREVTTNA

SEQ ID NO: 4878 - protein, 20 aa, Homo sapiens
ALLARKQGAGDSLIAGSAMS

SEQ ID NO: 4879 - protein, 20 aa, Homo sapiens
TLQTVHFTSEAVELQDMSLL

SEQ ID NO: 4880 - protein, 20 aa, Homo sapiens
TDNNLAVYDLSRDILNNFPH

SEQ ID NO: 4881 - protein, 20 aa, Homo sapiens
LEGGHWLSEKRHRLQAIRDG

SEQ ID NO: 4882 - protein, 20 aa, Homo sapiens
SVDSFQIVLDPMLDFYSDKN

SEQ ID NO: 4883 - protein, 20 aa, Homo sapiens
PNTKAEMEMSLAEELNHGRQ

SEQ ID NO: 4884 - protein, 20 aa, Homo sapiens
FERIMKYERLARILLQEIPI

SEQ ID NO: 4885 - protein, 20 aa, Homo sapiens
PVKGYELAVTQHQQLAEIDI

SEQ ID NO: 4886 - protein, 20 aa, Homo sapiens
MAASALRGLPVAGGGESSES

SEQ ID NO: 4887 - protein, 20 aa, Homo sapiens
RNRPGMLVLTPTRELALQVE

SEQ ID NO: 4888 - protein, 20 aa, Homo sapiens
EMTKYHSDEYIKFLRSIRPD

SEQ ID NO: 4889 - protein, 20 aa, Homo sapiens
QVNTDSETAVVNVTYSSKDQ

SEQ ID NO: 4890 - protein, 20 aa, Homo sapiens
SILKNLRRVHPVSTMVKGLY

SEQ ID NO: 4891 - protein, 20 aa, Homo sapiens
LGFSPGPILPSTRKLYEKKL

SEQ ID NO: 4892 - protein, 20 aa, Homo sapiens
GSDPVRYEFLWGPRALAETS

SEQ ID NO: 4893 - protein, 20 aa, Homo sapiens
EPRKLITQDLVKLKYLEYRQ

SEQ ID NO: 4894 - protein, 20 aa, Homo sapiens
PVSSSFSYTLLSLFQSSPER

SEQ ID NO: 4895 - protein, 20 aa, Homo sapiens
NAPPAYEKLSAEQSPPPYSP

SEQ ID NO: 4896 - protein, 20 aa, Homo sapiens
RAKRKLYTSEISSPIDISGQ

SEQ ID NO: 4897 - protein, 20 aa, Homo sapiens
AFSHTQVIELERKFSHQKYL

SEQ ID NO: 4898 - protein, 20 aa, Homo sapiens
FKDPKRAMEAFNLVRESEQL

SEQ ID NO: 4899 - protein, 20 aa, Homo sapiens
STWQELILLSSLTVYSKQIF

SEQ ID NO: 4900 - protein, 20 aa, Homo sapiens
PKKPSAFKPAIEMQNSVPNK

SEQ ID NO: 4901 - protein, 20 aa, Homo sapiens
KNYEGMIDNYKSQVMKTRLE

SEQ ID NO: 4902 - protein, 20 aa, Homo sapiens
SIPQFPITSDSTISTLETPQ

SEQ ID NO: 4903 - protein, 20 aa, Homo sapiens
RSVPAGLTLQSVSPQSLQGK

SEQ ID NO: 4904 - protein, 20 aa, Homo sapiens
RRSIAGFVASINEGMTRWFS

SEQ ID NO: 4905 - protein, 20 aa, Homo sapiens
GSEGTVVQLLANHFRVISRP

SEQ ID NO: 4906 - protein, 20 aa, Homo sapiens
FEGRTRYSRITGGMEAEVGE

SEQ ID NO: 4907 - protein, 20 aa, Homo sapiens
APRLAEYQAYIDFEMKIGDP

SEQ ID NO: 4908 - protein, 20 aa, Homo sapiens
ESKQLNVYEIKVNKLELELE

SEQ ID NO: 4909 - protein, 20 aa, Homo sapiens
GEVQNMLEGVGVDINKALLA

SEQ ID NO: 4910 - protein, 20 aa, Homo sapiens
YESTSAHIIEETEYVKKIRT

SEQ ID NO: 4911 - protein, 20 aa, Homo sapiens
IAKPNNAYEFGQIINALSTR

SEQ ID NO: 4912 - protein, 20 aa, Homo sapiens
STAHSRIRKERPISLGIFPL

SEQ ID NO: 4913 - protein, 20 aa, Homo sapiens
QDIHVTRDVVKHHLSKSDLL

SEQ ID NO: 4914 - protein, 20 aa, Homo sapiens
DVLDRHRESLLAALRRGGRE

SEQ ID NO: 4915 - protein, 20 aa, Homo sapiens
DNDHNRRIQVEHPQMTFGRL

SEQ ID NO: 4916 - protein, 20 aa, Homo sapiens
FGRLQGIFPKIMPKKPAEEG

SEQ ID NO: 4917 - protein, 20 aa, Homo sapiens
HRLRERKQLVVYEEISDPEE

SEQ ID NO: 4918 - protein, 20 aa, Homo sapiens
QIPEKMQKAFDDIAKYFSEK

SEQ ID NO: 4919 - protein, 20 aa, Homo sapiens
KIEDLMEMVQKLQKVGSLEP

SEQ ID NO: 4920 - protein, 20 aa, Homo sapiens
TADELRMISSTFLNLPFQGI

SEQ ID NO: 4921 - protein, 20 aa, Homo sapiens
RITIGTLFSVLHERRSQFPV

SEQ ID NO: 4922 - protein, 20 aa, Homo sapiens
FRQPIFSQYASHQPLPQATY

SEQ ID NO: 4923 - protein, 20 aa, Homo sapiens
RRQLDETNDELAQIARERDI

SEQ ID NO: 4924 - protein, 20 aa, Homo sapiens
TPESAPEELLAVQVELEPVN

SEQ ID NO: 4925 - protein, 20 aa, Homo sapiens
AYPEKMRNRVLLELNSADLD

SEQ ID NO: 4926 - protein, 20 aa, Homo sapiens
DVAFLLVYREKSNYVGATFQ

SEQ ID NO: 4927 - protein, 20 aa, Homo sapiens
LQTMKQEFLINLVKQKPQIT

SEQ ID NO: 4928 - protein, 20 aa, Homo sapiens
YDSDSWAEDLIVSALLLIQY

SEQ ID NO: 4929 - protein, 20 aa, Homo sapiens
KEFADSISKGLMVYANQVAS

SEQ ID NO: 4930 - protein, 20 aa, Homo sapiens
AQRQDIAFAYQRRTKKELAS

SEQ ID NO: 4931 - protein, 20 aa, Homo sapiens
YNPPDHEVVTMARMLQDVFE

SEQ ID NO: 4932 - protein, 20 aa, Homo sapiens
EYSDKTTQFPSVYAVPGTEQ

SEQ ID NO: 4933 - protein, 20 aa, Homo sapiens
KEAQEQEFLSLQEEFQKLEK

SEQ ID NO: 4934 - protein, 20 aa, Homo sapiens
TQYDLSEFENIGAIGLELWQ

SEQ ID NO: 4935 - protein, 20 aa, Homo sapiens
NKHNELRKAVSPPASNMLKM

SEQ ID NO: 4936 - protein, 20 aa, Homo sapiens
SVRSRLYVGREKKLALMLSG

SEQ ID NO: 4937 - protein, 20 aa, Homo sapiens
DSKLAVSLAETTGLIKLEEE

SEQ ID NO: 4938 - protein, 20 aa, Homo sapiens
SGLINSNTDNNLAVYDLSRD

SEQ ID NO: 4939 - protein, 20 aa, Homo sapiens
HKDWIFSIAWISDTMAVSGS

SEQ ID NO: 4940 - protein, 20 aa, Homo sapiens
LVIAEMMELGSRSRGASQKK

SEQ ID NO: 4941 - protein, 20 aa, Homo sapiens
EDYFSHHLAVYNSPQFKKTM

SEQ ID NO: 4942 - protein, 20 aa, Homo sapiens
STEPGSFKVDTASNLNSGKE

SEQ ID NO: 4943 - protein, 20 aa, Homo sapiens
KMEEKYQLTARLNMEQLLQS

SEQ ID NO: 4944 - protein, 20 aa, Homo sapiens
IPEELVSMAERFKAHQQKRE

SEQ ID NO: 4945 - protein, 20 aa, Homo sapiens
QDTDTKITISPLQELTLYNP

SEQ ID NO: 4946 - protein, 20 aa, Homo sapiens
AAYNKLLNNNLSLKYSQTGY

SEQ ID NO: 4947 - protein, 20 aa, Homo sapiens
LDGAQDSDDSEELNIILQGN

SEQ ID NO: 4948 - protein, 20 aa, Homo sapiens
DGSFSFKLLNQLGMIEEPRL

SEQ ID NO: 4949 - protein, 20 aa, Homo sapiens
LLTQNWVQEKYLVYRQVPGT

SEQ ID NO: 4950 - protein, 20 aa, Homo sapiens
EEQETASSSSTLVEVTLREV

SEQ ID NO: 4951 - protein, 20 aa, Homo sapiens
VAELVRFLLRKYQIKEPVTK

SEQ ID NO: 4952 - protein, 20 aa, Homo sapiens
LNGASRRLELVFGLDLKEDN

SEQ ID NO: 4953 - protein, 20 aa, Homo sapiens
NSATEEEIWEFLNMLGVYDG

SEQ ID NO: 4954 - protein, 20 aa, Homo sapiens
SKMKVLEFWAKVNKTVPSAF

SEQ ID NO: 4955 - protein, 20 aa, Homo sapiens
FRKVSQRTELVFGLALKEVN

SEQ ID NO: 4956 - protein, 20 aa, Homo sapiens
PHSSPPYYEFLWGPRAHSES

SEQ ID NO: 4957 - protein, 20 aa, Homo sapiens
QKFGDFLQHSPSILQSKAKK

SEQ ID NO: 4958 - protein, 20 aa, Homo sapiens
HQKYLSAPERAHLAKNLKLT

SEQ ID NO: 4959 - protein, 20 aa, Homo sapiens
SDEGMEVIERLIYLYHKFHQ

SEQ ID NO: 4960 - protein, 20 aa, Homo sapiens
PSLSQEQQEMVQAFSAQSGM

SEQ ID NO: 4961 - protein, 20 aa, Homo sapiens
IEVHNKASLTPLLLSITKRS

SEQ ID NO: 4962 - protein, 20 aa, Homo sapiens
LKEKIVLTHNRLKSLMKILS

SEQ ID NO: 4963 - protein, 20 aa, Homo sapiens
MQKLGFGTGVNVYLMKRSPR

SEQ ID NO: 4964 - protein, 20 aa, Homo sapiens
YNVTSDYAVHPMSPVGRTSR

SEQ ID NO: 4965 - protein, 20 aa, Homo sapiens
VGQSIHREPNLSLSNRLYYL

SEQ ID NO: 4966 - protein, 20 aa, Homo sapiens
VAGSMGFNVDYPKIIKVQEN

SEQ ID NO: 4967 - protein, 20 aa, Homo sapiens
NLRRLLLSHIHASSYISPEK

SEQ ID NO: 4968 - protein, 20 aa, Homo sapiens
EENSRLLQERGVAYINADSS

SEQ ID NO: 4969 - protein, 20 aa, Homo sapiens
KRRGPAYVMELPKLKLSGVV

SEQ ID NO: 4970 - protein, 20 aa, Homo sapiens
QVISVTFEKALNAGFIQATD

SEQ ID NO: 4971 - protein, 20 aa, Homo sapiens
DSDPALQKVNFLPVLEQVGN

SEQ ID NO: 4972 - protein, 20 aa, Homo sapiens
DVIEGKTAVIEKRRKKRSSA

SEQ ID NO: 4973 - protein, 20 aa, Homo sapiens
EAQNKELKTQVALSSETPRT

SEQ ID NO: 4974 - protein, 20 aa, Homo sapiens
DLNKVILLDPSIIEAKMELE

SEQ ID NO: 4975 - protein, 20 aa, Homo sapiens
DIMRDRIEQVRRSISRLTDV

SEQ ID NO: 4976 - protein, 20 aa, Homo sapiens
PNRGNQVERPQMTFGRLQGI

SEQ ID NO: 4977 - protein, 20 aa, Homo sapiens
AQIPEKIQKAFDDIAKYFSK

SEQ ID NO: 4978 - protein, 20 aa, Homo sapiens
KDKLKIDLLPDGRHAVVEVE

SEQ ID NO: 4979 - protein, 20 aa, Homo sapiens
DFSTKSVFSKFAQLNLAAED

SEQ ID NO: 4980 - protein, 20 aa, Homo sapiens
LQVRGAEASRLWASRLTDDS

SEQ ID NO: 4981 - protein, 20 aa, Homo sapiens
EDIPEISRLSISQKLPSTTM

SEQ ID NO: 4982 - protein, 20 aa, Homo sapiens
MDVLLRVFVERRQQYFSDLF

SEQ ID NO: 4983 - protein, 20 aa, Homo sapiens
DDERMEQMSNMTLMKETIST

SEQ ID NO: 4984 - protein, 20 aa, Homo sapiens
YEVEAYRRRHHNSSLNFFNW

SEQ ID NO: 4985 - protein, 20 aa, Homo sapiens
FLLHHAFVDSIFEQWLRRHR

SEQ ID NO: 4986 - protein, 20 aa, Homo sapiens
GATLKGVAAGSSSSVKWTEG

SEQ ID NO: 4987 - protein, 20 aa, Homo sapiens
DERQNRSFEGMVVAALLAGR

SEQ ID NO: 4988 - protein, 20 aa, Homo sapiens
QKATDIMDAMLRKLYNVMFA

SEQ ID NO: 4989 - protein, 20 aa, Homo sapiens
ELEHLQTVKNISPLQILPPS

SEQ ID NO: 4990 - protein, 20 aa, Homo sapiens
QEKRGAVYERVTTINQEIQK

SEQ ID NO: 4991 - protein, 20 aa, Homo sapiens
QLQVQREIVNKHNELRKAVS

SEQ ID NO: 4992 - protein, 20 aa, Homo sapiens
MMQKPGSNAPVGGNVTSSFS

SEQ ID NO: 4993 - protein, 20 aa, Homo sapiens
QLLAERTKEQLFFVETMSGD

SEQ ID NO: 4994 - protein, 20 aa, Homo sapiens
ADMADVMRLLSHLKIVEEAL

SEQ ID NO: 4995 - protein, 20 aa, Homo sapiens
VEEDKPHYGLRAIKVDVVPR

SEQ ID NO: 4996 - protein, 20 aa, Homo sapiens
SMVENKLVELEHTLLSKGFR

SEQ ID NO: 4997 - protein, 20 aa, Homo sapiens
VPPPRFRPRYRRPFRPRPRQ

SEQ ID NO: 4998 - protein, 20 aa, Homo sapiens
KMTDNKTGEVLISENVVASI

SEQ ID NO: 4999 - protein, 20 aa, Homo sapiens
PQYSMALAADSASGEVGNPL

SEQ ID NO: 5000 - protein, 20 aa, Homo sapiens
GVPFRTVSEWLESIKMQQYT

SEQ ID NO: 5001 - protein, 20 aa, Homo sapiens
VAQTSLEEFNVLEMEVMRRQ

SEQ ID NO: 5002 - protein, 20 aa, Homo sapiens
KHNQDFIKRNIELAKESRNP

SEQ ID NO: 5003 - protein, 20 aa, Homo sapiens
ARRDLKVFGNFPKLIMTQVS

SEQ ID NO: 5004 - protein, 20 aa, Homo sapiens
SYTWDFGDSSGTLISRALVV

SEQ ID NO: 5005 - protein, 20 aa, Homo sapiens
PYNDYFEYFGPDFKLHISPS

SEQ ID NO: 5006 - protein, 20 aa, Homo sapiens
RQQTDMAVNWAGGLHHAKKS

SEQ ID NO: 5007 - protein, 20 aa, Homo sapiens
LQEPSDLRAVLLINSKSYVS

SEQ ID NO: 5008 - protein, 20 aa, Homo sapiens
GETRLALVQRNVAIMKSIIP

SEQ ID NO: 5009 - protein, 20 aa, Homo sapiens
AREPFTKAEMLGSVIRNFQD

SEQ ID NO: 5010 - protein, 20 aa, Homo sapiens
DGREHTVYGEPRKLLTQDWV

SEQ ID NO: 5011 - protein, 20 aa, Homo sapiens
AEMLESVIKNYKRYFPVIFG

SEQ ID NO: 5012 - protein, 20 aa, Homo sapiens
ETTKMKVLEFLAKMNGATPR

SEQ ID NO: 5013 - protein, 20 aa, Homo sapiens
LKKPQRALSTTTSVDVSYKK

SEQ ID NO: 5014 - protein, 20 aa, Homo sapiens
LQIPVSPSSSSTLLSLFQSF

SEQ ID NO: 5015 - protein, 20 aa, Homo sapiens
KDYFPVILKRAREFMELLFG

SEQ ID NO: 5016 - protein, 20 aa, Homo sapiens
LKSGSMRIGKDFILFTKKEE

SEQ ID NO: 5017 - protein, 20 aa, Homo sapiens
EENIGILPRTLNVLFDSLQE

SEQ ID NO: 5018 - protein, 20 aa, Homo sapiens
RAHLAKNLKLTETQVKIWFQ

SEQ ID NO: 5019 - protein, 20 aa, Homo sapiens
SLVEKTPDEAASLVEGTSDK

SEQ ID NO: 5020 - protein, 20 aa, Homo sapiens
FKLENERLKASFAPMEDKLN

SEQ ID NO: 5021 - protein, 20 aa, Homo sapiens
KASQPSFSIKGRSKLGGFSD

SEQ ID NO: 5022 - protein, 20 aa, Homo sapiens
DQASFTTSMEWDTQVVKGSS

SEQ ID NO: 5023 - protein, 20 aa, Homo sapiens
TEADRVIQRTNSMQQLEQWI

SEQ ID NO: 5024 - protein, 20 aa, Homo sapiens
DVSHKLLRIETAYDFIKRTS

SEQ ID NO: 5025 - protein, 20 aa, Homo sapiens
QEAQPLQPSHFLDISEDWSL

SEQ ID NO: 5026 - protein, 20 aa, Homo sapiens
LTSPSMEIKEVASIILHKDF

SEQ ID NO: 5027 - protein, 20 aa, Homo sapiens
YDPDERIAAHQALQHPYFQE

SEQ ID NO: 5028 - protein, 20 aa, Homo sapiens
FVPPRSSSSQVSAVKPQTLG

SEQ ID NO: 5029 - protein, 20 aa, Homo sapiens
RKRLEMYTKASLKTSNQKIE

SEQ ID NO: 5030 - protein, 20 aa, Homo sapiens
NLVQRMEKEKRTLLERKLSL

SEQ ID NO: 5031 - protein, 20 aa, Homo sapiens
EQVRRSISRLTDVSAQDFSM

SEQ ID NO: 5032 - protein, 20 aa, Homo sapiens
PNRGNQVQRPQMTFGRLQGI

SEQ ID NO: 5033 - protein, 20 aa, Homo sapiens
KQKNEKLISLQEQLQRFLKK

SEQ ID NO: 5034 - protein, 20 aa, Homo sapiens
IISDVLIDEHLVLKSASPHK

SEQ ID NO: 5035 - protein, 20 aa, Homo sapiens
DKKSENIASLGESLAMKEKT

SEQ ID NO: 5036 - protein, 20 aa, Homo sapiens
LADLSPFAFSGSNASVSAPS

SEQ ID NO: 5037 - protein, 20 aa, Homo sapiens
SPNTLKEIEASAEVSPTTMT

SEQ ID NO: 5038 - protein, 20 aa, Homo sapiens
IERGRILNWEGVQYLWSFVL

SEQ ID NO: 5039 - protein, 20 aa, Homo sapiens
PPSKKSFFYKEVFESRNGDY

SEQ ID NO: 5040 - protein, 20 aa, Homo sapiens
DIMEAMLKRLVSALIGEEKE

SEQ ID NO: 5041 - protein, 20 aa, Homo sapiens
DEIEIDFETLKASTLRELEK

SEQ ID NO: 5042 - protein, 20 aa, Homo sapiens
KTTSGMSKKSVESVKLAQLE

SEQ ID NO: 5043 - protein, 20 aa, Homo sapiens
QDWEKHFLDASTSKQSDWNG

SEQ ID NO: 5044 - protein, 20 aa, Homo sapiens
EKQDYKQKLKALKIEVNKLK

SEQ ID NO: 5045 - protein, 20 aa, Homo sapiens
ESPDLSISHSQVEQLVNKTS

SEQ ID NO: 5046 - protein, 20 aa, Homo sapiens
TLEGERNQIYIQLSEVDKTK

SEQ ID NO: 5047 - protein, 20 aa, Homo sapiens
SRDILNNFPHSIARQKRILV

SEQ ID NO: 5048 - protein, 20 aa, Homo sapiens
VVDVQTSQITKIPILKDREP

SEQ ID NO: 5049 - protein, 20 aa, Homo sapiens
EVLISENVVASIQPAEGSFE

SEQ ID NO: 5050 - protein, 20 aa, Homo sapiens
GISHPIPLPSAAELLVKREN

SEQ ID NO: 5051 - protein, 20 aa, Homo sapiens
DLAPDTTYLVQVQALTQEGQ

SEQ ID NO: 5052 - protein, 20 aa, Homo sapiens
KAAGSASAKRVWNMTATRPK

SEQ ID NO: 5053 - protein, 20 aa, Homo sapiens
SKTLGIGRLKRPSFLDDPLY

SEQ ID NO: 5054 - protein, 20 aa, Homo sapiens
EAGLAEYLFDKLTLGGRVKE

SEQ ID NO: 5055 - protein, 20 aa, Homo sapiens
PVNSQKITLEWASPQNFTSV

SEQ ID NO: 5056 - protein, 20 aa, Homo sapiens
MEVTVYHRRGSRSYVPLAHS

SEQ ID NO: 5057 - protein, 20 aa, Homo sapiens
KALENFKTGKVRILIATDLA

SEQ ID NO: 5058 - protein, 20 aa, Homo sapiens
QNSRQYLDQIRQTIFENLKM

SEQ ID NO: 5059 - protein, 20 aa, Homo sapiens
SIPVHLNSLPRLETLVAEVQ

SEQ ID NO: 5060 - protein, 20 aa, Homo sapiens
THEDKIVRRNATMIFGILAS

SEQ ID NO: 5061 - protein, 20 aa, Homo sapiens
APEEEIWEELSVMEVYDGRE

SEQ ID NO: 5062 - protein, 20 aa, Homo sapiens
TVRPADLTRVIMPLEQRSQH

SEQ ID NO: 5063 - protein, 20 aa, Homo sapiens
PVIFGKASESLKMIFGIDVK

SEQ ID NO: 5064 - protein, 20 aa, Homo sapiens
TKAEMLESVIKNYKNHFPDI

SEQ ID NO: 5065 - protein, 20 aa, Homo sapiens
EPRKLLTQDWVQENYLEYRQ

SEQ ID NO: 5066 - protein, 20 aa, Homo sapiens
QSRTDPLIMKTNMLVQFLME

SEQ ID NO: 5067 - protein, 20 aa, Homo sapiens
TTAMTSAYSRATSSSSSQPM

SEQ ID NO: 5068 - protein, 20 aa, Homo sapiens
EYKPYFPQILNRTSQHLVVA

SEQ ID NO: 5069 - protein, 20 aa, Homo sapiens
PLQSPVISFSSSTSLSPFSE

SEQ ID NO: 5070 - protein, 20 aa, Homo sapiens
EEEEEASSASSTLYLVFSPS

SEQ ID NO: 5071 - protein, 20 aa, Homo sapiens
KKIIETMSSSKLSNVEASKE

SEQ ID NO: 5072 - protein, 20 aa, Homo sapiens
LSSELGDLEKHSSLPALKEE

SEQ ID NO: 5073 - protein, 20 aa, Homo sapiens
KFKEHLKQMTLQLELKQIPW

SEQ ID NO: 5074 - protein, 20 aa, Homo sapiens
SETLKHLVLQFLQQYYSIYD

SEQ ID NO: 5075 - protein, 20 aa, Homo sapiens
ELSKSMESMRGHLQAQLRSK

SEQ ID NO: 5076 - protein, 20 aa, Homo sapiens
IVNASEMDIQNVPLSEKIAE

SEQ ID NO: 5077 - protein, 20 aa, Homo sapiens
YSPQRTYRSEVSSPIQRGDV

SEQ ID NO: 5078 - protein, 20 aa, Homo sapiens
LQFYNIIFRRLLKIMNLQQI

SEQ ID NO: 5079 - protein, 20 aa, Homo sapiens
DYPKIIKVQENPAAFVRAIQ

SEQ ID NO: 5080 - protein, 20 aa, Homo sapiens
LYSEELFPEELSVVLGTNDL

SEQ ID NO: 5081 - protein, 20 aa, Homo sapiens
SFDSLFSAVKNFTEIASKFS

SEQ ID NO: 5082 - protein, 20 aa, Homo sapiens
YVMELPKLKLSGVVRLSSYS

SEQ ID NO: 5083 - protein, 20 aa, Homo sapiens
AIVEAARLEKVHSLFRRQLA

SEQ ID NO: 5084 - protein, 20 aa, Homo sapiens
EETRQVYMDLNNNIEKMITA

SEQ ID NO: 5085 - protein, 20 aa, Homo sapiens
LQQSRIVQSQRLKTIKQLYE

SEQ ID NO: 5086 - protein, 20 aa, Homo sapiens
DRDEAWVLETIGKYWAAEKV

SEQ ID NO: 5087 - protein, 20 aa, Homo sapiens
KQEDSKQLLQVNKLEKEQKL

SEQ ID NO: 5088 - protein, 20 aa, Homo sapiens
FLPITSSDIDVVESEAVSVL

SEQ ID NO: 5089 - protein, 20 aa, Homo sapiens
ADSKMKAEIQALTFLSSDYL

SEQ ID NO: 5090 - protein, 20 aa, Homo sapiens
LQIEEEKNKQRQLRLAFEEQ

SEQ ID NO: 5091 - protein, 20 aa, Homo sapiens
GSIPGFLISSGMSSHKQGHT

SEQ ID NO: 5092 - protein, 20 aa, Homo sapiens
TDGRHFVSQTTGNLYIARTN

SEQ ID NO: 5093 - protein, 20 aa, Homo sapiens
EDTTLTITVPAVSRRVEELS

SEQ ID NO: 5094 - protein, 20 aa, Homo sapiens
ENELDSAHSEIELLRSQMAN

SEQ ID NO: 5095 - protein, 20 aa, Homo sapiens
IQDVRRVPGVAPTLVRSASE

SEQ ID NO: 5096 - protein, 20 aa, Homo sapiens
EHGQEIFQKKVSPPGPALNV

SEQ ID NO: 5097 - protein, 20 aa, Homo sapiens
GYHYRYEINADPRLTNLSSN

SEQ ID NO: 5098 - protein, 20 aa, Homo sapiens
MDTSTDPVRVLSWLRRDLEK

SEQ ID NO: 5099 - protein, 20 aa, Homo sapiens
PNHHQLAFNYQELEHLQTVK

SEQ ID NO: 5100 - protein, 20 aa, Homo sapiens
DQAPEVTLQADIEVMSTVHI

SEQ ID NO: 5101 - protein, 20 aa, Homo sapiens
SDEAKSIRDVPTLLGAKLDK

SEQ ID NO: 5102 - protein, 20 aa, Homo sapiens
SKSLKSQVAEAKMTFKRFQA

SEQ ID NO: 5103 - protein, 20 aa, Homo sapiens
AEAKMTFKIFQMNEERLKIA

SEQ ID NO: 5104 - protein, 20 aa, Homo sapiens
AFQDSVLEEEVELVLAPSEE

SEQ ID NO: 5105 - protein, 20 aa, Homo sapiens
PQRPRNRPYFQRRRQQAPGP

SEQ ID NO: 5106 - protein, 20 aa, Homo sapiens
LFSAPMDFRGLPGNYHKEEN

SEQ ID NO: 5107 - protein, 20 aa, Homo sapiens
VENTPDLVSDSTYYSSFYQP

SEQ ID NO: 5108 - protein, 20 aa, Homo sapiens
TVNGEQLDLDPGQTLIYYVD

SEQ ID NO: 5109 - protein, 20 aa, Homo sapiens
KYRKLIESELSYFVIVYSVM

SEQ ID NO: 5110 - protein, 20 aa, Homo sapiens
DIEDVTPVFPQLSRSIISKL

SEQ ID NO: 5111 - protein, 20 aa, Homo sapiens
SSFNPAALSRHMSSLSHISP

SEQ ID NO: 5112 - protein, 20 aa, Homo sapiens
EAFEIVVRHAKNYTNAMFKN

SEQ ID NO: 5113 - protein, 20 aa, Homo sapiens
GEARLREMEALQSLRLANEG

SEQ ID NO: 5114 - protein, 20 aa, Homo sapiens
GGLKKLLSFAENSTIPDIQK

SEQ ID NO: 5115 - protein, 20 aa, Homo sapiens
GSDPRSFPLWYEEALKDEEE

SEQ ID NO: 5116 - protein, 20 aa, Homo sapiens
REDSGDFGLQVSTMFSEDDF

SEQ ID NO: 5117 - protein, 20 aa, Homo sapiens
APEEKIWEELSMLEVFEGRE

SEQ ID NO: 5118 - protein, 20 aa, Homo sapiens
KASSSLQLVFGIELMEVDPI

SEQ ID NO: 5119 - protein, 20 aa, Homo sapiens
AASSSSTLIMGTLEEVTDSG

SEQ ID NO: 5120 - protein, 20 aa, Homo sapiens
EEPSSSVDPAQLEFMFQEAL

SEQ ID NO: 5121 - protein, 20 aa, Homo sapiens
GEPRKFITQDLVQEKYLKYE

SEQ ID NO: 5122 - protein, 20 aa, Homo sapiens
AETSKMKVLEFLAKVNGTTP

SEQ ID NO: 5123 - protein, 20 aa, Homo sapiens
NSNPARYEFLWGPRAHAETS

SEQ ID NO: 5124 - protein, 20 aa, Homo sapiens
PHLYEDALIDEVERALRLRA

SEQ ID NO: 5125 - protein, 20 aa, Homo sapiens
SDEQGMSQNRLLILILSIIF

SEQ ID NO: 5126 - protein, 20 aa, Homo sapiens
TSASGSASGSASTLVHNGTS

SEQ ID NO: 5127 - protein, 20 aa, Homo sapiens
EAFSRASLVSVYNSYPYYPY

SEQ ID NO: 5128 - protein, 20 aa, Homo sapiens
MAASFFSDFGLMWYLEELKK

SEQ ID NO: 5129 - protein, 20 aa, Homo sapiens
RADPVDLEFSVDQVDSVDQE

SEQ ID NO: 5130 - protein, 20 aa, Homo sapiens
SATEVGRIQASPLPRSVDLS

SEQ ID NO: 5131 - protein, 20 aa, Homo sapiens
KYADKIYSISMKHPQEMKTY

SEQ ID NO: 5132 - protein, 20 aa, Homo sapiens
YVEIWQAYLDYLRRRVDFKQ

SEQ ID NO: 5133 - protein, 20 aa, Homo sapiens
MEKQKPFALFVPPRSSSSQV

SEQ ID NO: 5134 - protein, 20 aa, Homo sapiens
IEKRRKKRSSAGVVEDMGGE

SEQ ID NO: 5135 - protein, 20 aa, Homo sapiens
QDKRIENLREKVNILEAQNK

SEQ ID NO: 5136 - protein, 20 aa, Homo sapiens
LKNNLIEKDPSLVYQHLLYL

SEQ ID NO: 5137 - protein, 20 aa, Homo sapiens
KTRDGGSVVGASVFYKDVAG

SEQ ID NO: 5138 - protein, 20 aa, Homo sapiens
PDVENEVKRLLRSDAEAVST

SEQ ID NO: 5139 - protein, 20 aa, Homo sapiens
WKRLGWSESSRIIVLDQSDL

SEQ ID NO: 5140 - protein, 20 aa, Homo sapiens
PSSRILQLSKPKAPATLLEE

SEQ ID NO: 5141 - protein, 20 aa, Homo sapiens
DLKIQIEMEKKVVFSTISLG

SEQ ID NO: 5142 - protein, 20 aa, Homo sapiens
KVITKEYLVNITEYRASHST

SEQ ID NO: 5143 - protein, 20 aa, Homo sapiens
FINHQIIYAGEKNHQYGKSF

SEQ ID NO: 5144 - protein, 20 aa, Homo sapiens
EDVVLRWSQEFSTLTLGQFG

SEQ ID NO: 5145 - protein, 20 aa, Homo sapiens
QKQSSYVGWWIHFRIVEIVV

SEQ ID NO: 5146 - protein, 20 aa, Homo sapiens
ERQLNEAVGNVTPLQLLDWL

SEQ ID NO: 5147 - protein, 20 aa, Homo sapiens
VPHLQKVFDRYKSYSPYDML

SEQ ID NO: 5148 - protein, 20 aa, Homo sapiens
KNGRLTNQLQYLQKVVLKDL

SEQ ID NO: 5149 - protein, 20 aa, Homo sapiens
APGHMSDVEWMSIFKPSKMQ

SEQ ID NO: 5150 - protein, 20 aa, Homo sapiens
LKEFEKTIHFYQKKIILHEK

SEQ ID NO: 5151 - protein, 20 aa, Homo sapiens
SIYFSSDVVTGNVPLKVGQK

SEQ ID NO: 5152 - protein, 20 aa, Homo sapiens
VPVKGSRYAPNRRKSRRFIP

SEQ ID NO: 5153 - protein, 20 aa, Homo sapiens
DAQESSLGLTGLQSLLQGFS

SEQ ID NO: 5154 - protein, 20 aa, Homo sapiens
AISYRKFTSASDVWSFGIVM

SEQ ID NO: 5155 - protein, 20 aa, Homo sapiens
VESAVWYVKKFGRYLEHLEV

SEQ ID NO: 5156 - protein, 20 aa, Homo sapiens
KRKRKSEMLQKAARGREEHG

SEQ ID NO: 5157 - protein, 20 aa, Homo sapiens
QGLEMRIKLWEEIKSAKYSE

SEQ ID NO: 5158 - protein, 20 aa, Homo sapiens
LENFFRYFLRLSDDKMEHAQ

SEQ ID NO: 5159 - protein, 20 aa, Homo sapiens
SKDQQKILAALKELQVEEIQ

SEQ ID NO: 5160 - protein, 20 aa, Homo sapiens
KVKNQLRFLAELAYDLDVDD

SEQ ID NO: 5161 - protein, 20 aa, Homo sapiens
SQKRSFVYVWKTWGQYWQVL

SEQ ID NO: 5162 - protein, 20 aa, Homo sapiens
NLLLNYGLYRKMEIYRPHKA

SEQ ID NO: 5163 - protein, 20 aa, Homo sapiens
KKIRESYENDIASMNLQAHL

SEQ ID NO: 5164 - protein, 20 aa, Homo sapiens
EALFKKSAETLWNIQKDLIF

SEQ ID NO: 5165 - protein, 20 aa, Homo sapiens
KPPYSRLDYTDAKFVDVIHS

SEQ ID NO: 5166 - protein, 20 aa, Homo sapiens
SFSQDILHDKIIDLVHLLLR

SEQ ID NO: 5167 - protein, 20 aa, Homo sapiens
PRKLLTQDLVQENYLEYRQV

SEQ ID NO: 5168 - protein, 20 aa, Homo sapiens
GSNPARYEFLWGPRALAETS

SEQ ID NO: 5169 - protein, 20 aa, Homo sapiens
VVDEKYKDHFTEILNGASRR

SEQ ID NO: 5170 - protein, 20 aa, Homo sapiens
TKGEMLKIVGKRFREHFPEI

SEQ ID NO: 5171 - protein, 20 aa, Homo sapiens
KMKKPIMKADMLKIVQKSHK

SEQ ID NO: 5172 - protein, 20 aa, Homo sapiens
LKIISKKYKEHFPEIFRKVS

SEQ ID NO: 5173 - protein, 20 aa, Homo sapiens
LQIPVSRSFSSTLLSIFQSS

SEQ ID NO: 5174 - protein, 20 aa, Homo sapiens
ASSTLYLVFSPSSFSTSSSL

SEQ ID NO: 5175 - protein, 20 aa, Homo sapiens
ERSQRSQIANITTVWRAQPT

SEQ ID NO: 5176 - protein, 20 aa, Homo sapiens
QKWREERDQLVAALEIQLKA

SEQ ID NO: 5177 - protein, 20 aa, Homo sapiens
ETQFNQYKTEAASRYNLTIS

SEQ ID NO: 5178 - protein, 20 aa, Homo sapiens
EKLDAFFGFQLSQEIKQQIH

SEQ ID NO: 5179 - protein, 20 aa, Homo sapiens
EQLEERTWLLHDAIQNQQNA

SEQ ID NO: 5180 - protein, 20 aa, Homo sapiens
RPRRINMTDTGISPMSTRDP

SEQ ID NO: 5181 - protein, 20 aa, Homo sapiens
PIPESVIQNYNKALQQLEKY

SEQ ID NO: 5182 - protein, 20 aa, Homo sapiens
EELKGTEQELIGLLQAREKE

SEQ ID NO: 5183 - protein, 20 aa, Homo sapiens
EGVGVDINKALLAKRKRLEM

SEQ ID NO: 5184 - protein, 20 aa, Homo sapiens
EIEALLGMDLVRLGLERGET

SEQ ID NO: 5185 - protein, 20 aa, Homo sapiens
IPPRDKMEDNSALYESTSAH

SEQ ID NO: 5186 - protein, 20 aa, Homo sapiens
QAFPDMHNSNISKILGSRWK

SEQ ID NO: 5187 - protein, 20 aa, Homo sapiens
PGNVKALLRRATTYKHQNKL

SEQ ID NO: 5188 - protein, 20 aa, Homo sapiens
QKVGSLEPRVEVLINRINEV

SEQ ID NO: 5189 - protein, 20 aa, Homo sapiens
KVLLDAGFAVGEQSMVTDKP

SEQ ID NO: 5190 - protein, 20 aa, Homo sapiens
QAKATQFNSALFTLSSHRQG

SEQ ID NO: 5191 - protein, 20 aa, Homo sapiens
SRRVEELSRPKRFYLEYYNN

SEQ ID NO: 5192 - protein, 20 aa, Homo sapiens
KVLKSERDKIFLLYEQAQEE

SEQ ID NO: 5193 - protein, 20 aa, Homo sapiens
LIFLLNFTESRTLHRNEYGI

SEQ ID NO: 5194 - protein, 20 aa, Homo sapiens
QVASDMMVSLMKTLKVHSSG

SEQ ID NO: 5195 - protein, 20 aa, Homo sapiens
VNILTNRSNAQRQDIAFAYQ

SEQ ID NO: 5196 - protein, 20 aa, Homo sapiens
SGKINRHEHYFNQFHRRNEL

SEQ ID NO: 5197 - protein, 20 aa, Homo sapiens
LQQSLNQDFHQKTIVLQEGN

SEQ ID NO: 5198 - protein, 20 aa, Homo sapiens
PASNMLKMEWSREVTTNAQR

SEQ ID NO: 5199 - protein, 20 aa, Homo sapiens
EELERTIHSYQGQIISHEKK

SEQ ID NO: 5200 - protein, 20 aa, Homo sapiens
MSLLSIQQQEGVQVVVQQPG

SEQ ID NO: 5201 - protein, 20 aa, Homo sapiens
QPFEENEFIDASRLVYDGVR

SEQ ID NO: 5202 - protein, 20 aa, Homo sapiens
GLINSNTDNNLAVYDLSRDI

SEQ ID NO: 5203 - protein, 20 aa, Homo sapiens
LHKRKRLPPVKRSLVYYLKN

SEQ ID NO: 5204 - protein, 20 aa, Homo sapiens
TLSSHLQIDKMTDNKTGEVL

SEQ ID NO: 5205 - protein, 20 aa, Homo sapiens
DSKSLRTALQKEITTRYQLD

SEQ ID NO: 5206 - protein, 20 aa, Homo sapiens
GDQDNWLRTNWVYRGEAERI

SEQ ID NO: 5207 - protein, 20 aa, Homo sapiens
FIKRNIELAKESRNPVVMVD

SEQ ID NO: 5208 - protein, 20 aa, Homo sapiens
IQNAAVFQEAFEIVVRHAKN

SEQ ID NO: 5209 - protein, 20 aa, Homo sapiens
QVSLKVSNDGPTLIGANASF

SEQ ID NO: 5210 - protein, 20 aa, Homo sapiens
SDEYIKFLRSIRPDNMSEYS

SEQ ID NO: 5211 - protein, 20 aa, Homo sapiens
RDYTLRTFGEMADAFKSDYF

SEQ ID NO: 5212 - protein, 20 aa, Homo sapiens
TSLGLTYDGMLSDVQSMPKT

SEQ ID NO: 5213 - protein, 20 aa, Homo sapiens
LEHVVRVNARVRIAYPSLRE

SEQ ID NO: 5214 - protein, 20 aa, Homo sapiens
KASDSLQLVFGIELMEVDPI

SEQ ID NO: 5215 - protein, 20 aa, Homo sapiens
QENYLEYRQAPGSDPVRYEF

SEQ ID NO: 5216 - protein, 20 aa, Homo sapiens
DGEEHLIYGEPRKFITQDLV

SEQ ID NO: 5217 - protein, 20 aa, Homo sapiens
GEPWKLITKDLVQEKYLEYK

SEQ ID NO: 5218 - protein, 20 aa, Homo sapiens
KVDSTKDSYVLVSKMDLPNN

SEQ ID NO: 5219 - protein, 20 aa, Homo sapiens
AETSKMKVLEFLAKVNDTTP

SEQ ID NO: 5220 - protein, 20 aa, Homo sapiens
DDSTATESASSSVMSPSFSS

SEQ ID NO: 5221 - protein, 20 aa, Homo sapiens
YTLDEKVAELVEFLLLKYEA

SEQ ID NO: 5222 - protein, 20 aa, Homo sapiens
EQEKEEIASKSALLRQIKEV

SEQ ID NO: 5223 - protein, 20 aa, Homo sapiens
DSLVERLHRQTAEYSAFKLE

SEQ ID NO: 5224 - protein, 20 aa, Homo sapiens
EHGDSSAYENVKFIVNVRDI

SEQ ID NO: 5225 - protein, 20 aa, Homo sapiens
MDEAKILKSLHHPNIVGYRA

SEQ ID NO: 5226 - protein, 20 aa, Homo sapiens
IPTSPSHGSIAAYQGYSPQR

SEQ ID NO: 5227 - protein, 20 aa, Homo sapiens
HDIVNRQKSIAGFVASTNAE

SEQ ID NO: 5228 - protein, 20 aa, Homo sapiens
ARLVDNIQRNTNARFELETW

SEQ ID NO: 5229 - protein, 20 aa, Homo sapiens
SISISALQSLLQHLIGLSNL

SEQ ID NO: 5230 - protein, 20 aa, Homo sapiens
PYEEALLQAEAPRLAEYQAY

SEQ ID NO: 5231 - protein, 20 aa, Homo sapiens
EVEKAKVIADEAVKLQKEID

SEQ ID NO: 5232 - protein, 20 aa, Homo sapiens
SGKPSVEDQFTRAYDFETED

SEQ ID NO: 5233 - protein, 20 aa, Homo sapiens
LKIKLQASREAGAAALRNVA

SEQ ID NO: 5234 - protein, 20 aa, Homo sapiens
MITQLISLREQLLAAHDEQK

SEQ ID NO: 5235 - protein, 20 aa, Homo sapiens
GQGENKMKNLPVPVYLRPLD

SEQ ID NO: 5236 - protein, 20 aa, Homo sapiens
QGHTSSEYDMLREMFSDSRS

SEQ ID NO: 5237 - protein, 20 aa, Homo sapiens
PGNISWTFSSSSLSIKWDPV

SEQ ID NO: 5238 - protein, 20 aa, Homo sapiens
PQAKEMFIDTVISSYNIETA

SEQ ID NO: 5239 - protein, 20 aa, Homo sapiens
TERDVAFTDLRRMTTERDSL

SEQ ID NO: 5240 - protein, 20 aa, Homo sapiens
TPIEWYPDYEVEAYRRRHHN

SEQ ID NO: 5241 - protein, 20 aa, Homo sapiens
EDVRVSGWLQTEFLSFQDGD

SEQ ID NO: 5242 - protein, 20 aa, Homo sapiens
SNTYQLPDGSRVELTPMQRV

SEQ ID NO: 5243 - protein, 20 aa, Homo sapiens
LFGLEIWTNKNLIVVDDVRK

SEQ ID NO: 5244 - protein, 20 aa, Homo sapiens
KWVESIFLIFLLNFTESRTL

SEQ ID NO: 5245 - protein, 20 aa, Homo sapiens
LGNGSSVDEVSFYANRLTNL

SEQ ID NO: 5246 - protein, 20 aa, Homo sapiens
SSGKPIPASVVLKRVLLRHT

SEQ ID NO: 5247 - protein, 20 aa, Homo sapiens
KIRSEFKRKYGKSLYYYIQQ

SEQ ID NO: 5248 - protein, 20 aa, Homo sapiens
PDSQQQYNVVKTVKVTEQLR

SEQ ID NO: 5249 - protein, 20 aa, Homo sapiens
AQLEENAKYSSVYMEAEATA

SEQ ID NO: 5250 - protein, 20 aa, Homo sapiens
KMKNTDYLTQYDLSEFENIG

SEQ ID NO: 5251 - protein, 20 aa, Homo sapiens
ARNETLSNTLVELSAQVGQL

SEQ ID NO: 5252 - protein, 20 aa, Homo sapiens
SEQDELMADISKRIQSLEDE

SEQ ID NO: 5253 - protein, 20 aa, Homo sapiens
EHQLGNNTLSSHLQIDKMTD

SEQ ID NO: 5254 - protein, 20 aa, Homo sapiens
QQLGLSTNGKKIEVYLRLHR

SEQ ID NO: 5255 - protein, 20 aa, Homo sapiens
HKAREKPYDSKSLRTALQKE

SEQ ID NO: 5256 - protein, 20 aa, Homo sapiens
EQQKKIESYLHNHFIGEGMT

SEQ ID NO: 5257 - protein, 20 aa, Homo sapiens
GPLSVYPPASSSSLSGGHAS

SEQ ID NO: 5258 - protein, 20 aa, Homo sapiens
SLIYRRRLMKQDFSVPQLPH

SEQ ID NO: 5259 - protein, 20 aa, Homo sapiens
QLSTGGSVASAVKLNKQQTD

SEQ ID NO: 5260 - protein, 20 aa, Homo sapiens
HNLLLNYGLYRKMEIYRPHK

SEQ ID NO: 5261 - protein, 20 aa, Homo sapiens
IREDDTTLVTATVENETYTL

SEQ ID NO: 5262 - protein, 20 aa, Homo sapiens
QEGPSTFPDLETSFQVALSR

SEQ ID NO: 5263 - protein, 20 aa, Homo sapiens
EEGPRMFPDLESEFQAAISR

SEQ ID NO: 5264 - protein, 20 aa, Homo sapiens
VGNWQYFFPVIFSKASSSLQ

SEQ ID NO: 5265 - protein, 20 aa, Homo sapiens
EEGVEAQEEALGLVGAQAPT

SEQ ID NO: 5266 - protein, 20 aa, Homo sapiens
PAHLESLFREALDEKVAELV

SEQ ID NO: 5267 - protein, 20 aa, Homo sapiens
YKMREPIMKADMLKVVDEKY

SEQ ID NO: 5268 - protein, 20 aa, Homo sapiens
KSGSLVQFLLYKYKIKKSVT

SEQ ID NO: 5269 - protein, 20 aa, Homo sapiens
VDVSYKKSYKGANSKIEKKQ

SEQ ID NO: 5270 - protein, 20 aa, Homo sapiens
SASQKAIIFKRLSKDAVKKK

SEQ ID NO: 5271 - protein, 20 aa, Homo sapiens
STFEGFAQSSLQIPVSPSFS

SEQ ID NO: 5272 - protein, 20 aa, Homo sapiens
KLREILLYFFPEHQLPSELE

SEQ ID NO: 5273 - protein, 20 aa, Homo sapiens
QQHVPFRESKLTHYFQSFFN

SEQ ID NO: 5274 - protein, 20 aa, Homo sapiens
QLKVLIAENTMLTSKLKEKQ

SEQ ID NO: 5275 - protein, 20 aa, Homo sapiens
ITPPSSEKLVSVMRLSDLST

SEQ ID NO: 5276 - protein, 20 aa, Homo sapiens
SMEWDTQVVKGSSPLGPAGL

SEQ ID NO: 5277 - protein, 20 aa, Homo sapiens
GPPDPQAFQGPAAYQPDQMR

SEQ ID NO: 5278 - protein, 20 aa, Homo sapiens
GTGVNVYLMKRSPRGLSHSP

SEQ ID NO: 5279 - protein, 20 aa, Homo sapiens
DVMHLSQSPSVSQLSVLSLS

SEQ ID NO: 5280 - protein, 20 aa, Homo sapiens
IGEGTFSEVMKMQSLRDGNY

SEQ ID NO: 5281 - protein, 20 aa, Homo sapiens
RKQDNVLSNVLSGLINMAGA

SEQ ID NO: 5282 - protein, 20 aa, Homo sapiens
TEKENKMKDLTFLLEESRDK

SEQ ID NO: 5283 - protein, 20 aa, Homo sapiens
EYSQQFLTLFQQWDLDMQKA

SEQ ID NO: 5284 - protein, 20 aa, Homo sapiens
VAFPPRAKDGLVVFGKNSAR

SEQ ID NO: 5285 - protein, 20 aa, Homo sapiens
IQDIITSLARNEAPAFTIDN

SEQ ID NO: 5286 - protein, 20 aa, Homo sapiens
GQDTSSQKIEDLMEMVQKLQ

SEQ ID NO: 5287 - protein, 20 aa, Homo sapiens
DRGSETTYESSADIAGDEGT

SEQ ID NO: 5288 - protein, 20 aa, Homo sapiens
LMELNGSSSQLIIMLLKNFM

SEQ ID NO: 5289 - protein, 20 aa, Homo sapiens
SNAAIQIASATMPALSLNND

SEQ ID NO: 5290 - protein, 20 aa, Homo sapiens
NEGYDRRPLASMSLPPPKAS

SEQ ID NO: 5291 - protein, 20 aa, Homo sapiens
SSGRQSFYRNPIKEVVRFLD

SEQ ID NO: 5292 - protein, 20 aa, Homo sapiens
ELVRHHNMHQRNMTKLQLAL

SEQ ID NO: 5293 - protein, 20 aa, Homo sapiens
SQSSNLSQHQRIHMRENLLM

SEQ ID NO: 5294 - protein, 20 aa, Homo sapiens
PWPERLSNNVEELLQSSLSL

SEQ ID NO: 5295 - protein, 20 aa, Homo sapiens
LAKDLIVSALKLIQYHLTQQ

SEQ ID NO: 5296 - protein, 20 aa, Homo sapiens
LEKDIISDTSGDFRKLMVAL

SEQ ID NO: 5297 - protein, 20 aa, Homo sapiens
DKSKLWLLKDRDLARQKEQE

SEQ ID NO: 5298 - protein, 20 aa, Homo sapiens
KVSSIHSDQSDVLMVDVATS

SEQ ID NO: 5299 - protein, 20 aa, Homo sapiens
QERTNSELHNLRQIYVKQQS

SEQ ID NO: 5300 - protein, 20 aa, Homo sapiens
AQLQRTPMSALVFPNKISTE

SEQ ID NO: 5301 - protein, 20 aa, Homo sapiens
ELYQENEMKLHRKLTVEENY

SEQ ID NO: 5302 - protein, 20 aa, Homo sapiens
GPLKNTSDVINAAKKIAEAG

SEQ ID NO: 5303 - protein, 20 aa, Homo sapiens
RLFLKGNLLRGIDSLFSAPM

SEQ ID NO: 5304 - protein, 20 aa, Homo sapiens
VRTYWIIIELKHKAREKPYD

SEQ ID NO: 5305 - protein, 20 aa, Homo sapiens
VLPDGQVIWVNNTIINGSQV

SEQ ID NO: 5306 - protein, 20 aa, Homo sapiens
PARRAKRMRAEAMNIKIEPE

SEQ ID NO: 5307 - protein, 20 aa, Homo sapiens
LENFTLKVAYIPDEMAAQQN

SEQ ID NO: 5308 - protein, 20 aa, Homo sapiens
AAEADGIDPLINLLSSKRDG

SEQ ID NO: 5309 - protein, 20 aa, Homo sapiens
WKNIHKQVIQSAYEIIKLKG

SEQ ID NO: 5310 - protein, 20 aa, Homo sapiens
VKNTRKVAVSLSVHIKNLLK

SEQ ID NO: 5311 - protein, 20 aa, Homo sapiens
KVLEYVIKVSARVRFFFPSL

SEQ ID NO: 5312 - protein, 20 aa, Homo sapiens
ASEEEIWEELGVMGVYDGRE

SEQ ID NO: 5313 - protein, 20 aa, Homo sapiens
VGNWQYFFPVIFSKASDSLQ

SEQ ID NO: 5314 - protein, 20 aa, Homo sapiens
VNPNGHTYTFIDKVDLTDEE

SEQ ID NO: 5315 - protein, 20 aa, Homo sapiens
EFLNKMRIYDGKKHFIFGEP

SEQ ID NO: 5316 - protein, 20 aa, Homo sapiens
GEPRKLITQDLVQEKYLEYQ

SEQ ID NO: 5317 - protein, 20 aa, Homo sapiens
RTSQHLVVAFGVELKEMDSS

SEQ ID NO: 5318 - protein, 20 aa, Homo sapiens
LDEKVDELARFLLLKYQVKQ

SEQ ID NO: 5319 - protein, 20 aa, Homo sapiens
AFTKLNNASSRSHSIFTVKI

SEQ ID NO: 5320 - protein, 20 aa, Homo sapiens
PSPGSTLSSSRSVELNGFMA

SEQ ID NO: 5321 - protein, 20 aa, Homo sapiens
YLKGELLRRTKRDIVDSLSA

SEQ ID NO: 5322 - protein, 20 aa, Homo sapiens
IDIHFLERKMQHHLLKEKNE

SEQ ID NO: 5323 - protein, 20 aa, Homo sapiens
EKSEEYAEQLHVQLADKDLY

SEQ ID NO: 5324 - protein, 20 aa, Homo sapiens
QPDQMRSAEQTRLMPAEQRD

SEQ ID NO: 5325 - protein, 20 aa, Homo sapiens
SNSIKRNPNAPVVRRGWLYK

SEQ ID NO: 5326 - protein, 20 aa, Homo sapiens
QETAQLVGSTASQQPGYIQP

SEQ ID NO: 5327 - protein, 20 aa, Homo sapiens
MSGRARVKARGIARSPSATE

SEQ ID NO: 5328 - protein, 20 aa, Homo sapiens
RRLWGSIQSRYISMSVWTSP

SEQ ID NO: 5329 - protein, 20 aa, Homo sapiens
RPFYRHVIYAPSSHNKYAGE

SEQ ID NO: 5330 - protein, 20 aa, Homo sapiens
GSMKVKRQFVEFTIKEAARF

SEQ ID NO: 5331 - protein, 20 aa, Homo sapiens
QENRKIIEAQRKAIQELQFG

SEQ ID NO: 5332 - protein, 20 aa, Homo sapiens
MFRQQQKILQQSRIVQSQRL

SEQ ID NO: 5333 - protein, 20 aa, Homo sapiens
PLKNVRKKRFRKTQKKVPDV

SEQ ID NO: 5334 - protein, 20 aa, Homo sapiens
KLVENSLSISNPGLFTSLGP

SEQ ID NO: 5335 - protein, 20 aa, Homo sapiens
GEYFYSSTAQENLALETSSP

SEQ ID NO: 5336 - protein, 20 aa, Homo sapiens
LKKAHRRVHTSLQLITKVGE

SEQ ID NO: 5337 - protein, 20 aa, Homo sapiens
RKRRRRRRLMELAEPKINWQ

SEQ ID NO: 5338 - protein, 20 aa, Homo sapiens
TTDKILIDVFDGLPLYDDVK

SEQ ID NO: 5339 - protein, 20 aa, Homo sapiens
FWSWVGQANDIGLLKLKQEL

SEQ ID NO: 5340 - protein, 20 aa, Homo sapiens
ASPLTGIADASQSSMHNALH

SEQ ID NO: 5341 - protein, 20 aa, Homo sapiens
ENSRSMPKLEIFEKIESQRI

SEQ ID NO: 5342 - protein, 20 aa, Homo sapiens
GFTKRLFRELMGDHVSSTKA

SEQ ID NO: 5343 - protein, 20 aa, Homo sapiens
QITEEQLEAVIADFSGLLEK

SEQ ID NO: 5344 - protein, 20 aa, Homo sapiens
AQDKAESYSLISMKGMGDPK

SEQ ID NO: 5345 - protein, 20 aa, Homo sapiens
LSGEAAEAVHSGTSVKSSSG

SEQ ID NO: 5346 - protein, 20 aa, Homo sapiens
PVQEDMALNEVLQKLKHTNR

SEQ ID NO: 5347 - protein, 20 aa, Homo sapiens
TILSPKQIKTPFQKILRDKD

SEQ ID NO: 5348 - protein, 20 aa, Homo sapiens
VAEAKMTFKRFQANEERLEI

SEQ ID NO: 5349 - protein, 20 aa, Homo sapiens
AAPIHDADAQESSLGLTGLQ

SEQ ID NO: 5350 - protein, 20 aa, Homo sapiens
ASGALVGAASGSSAGGSSRG

SEQ ID NO: 5351 - protein, 20 aa, Homo sapiens
TRNDWRVASELINILERANQ

SEQ ID NO: 5352 - protein, 20 aa, Homo sapiens
LPEIQELYQTLLAKPSPAQQ

SEQ ID NO: 5353 - protein, 20 aa, Homo sapiens
SDLESIFKDAKIPVSGPFLV

SEQ ID NO: 5354 - protein, 20 aa, Homo sapiens
SSKRDGAIANAATVLTNMAM

SEQ ID NO: 5355 - protein, 20 aa, Homo sapiens
DLQHGSLFFSTSKITSGKDY

SEQ ID NO: 5356 - protein, 20 aa, Homo sapiens
DMNVIVVDWSRGATTFIYNR

SEQ ID NO: 5357 - protein, 20 aa, Homo sapiens
WVQENYLEYRQVPGSNPARY

SEQ ID NO: 5358 - protein, 20 aa, Homo sapiens
SVMGLYDGREHSVYWKLRKL

SEQ ID NO: 5359 - protein, 20 aa, Homo sapiens
NLSNDWDFPRNGLLMPLLGV

SEQ ID NO: 5360 - protein, 20 aa, Homo sapiens
RGQTQDHQGAQITATNKKKV

SEQ ID NO: 5361 - protein, 20 aa, Homo sapiens
RTHSTFEGFPQSLLQIPMTS

SEQ ID NO: 5362 - protein, 20 aa, Homo sapiens
KQEFLNVQEYNHLLKVMGQY

SEQ ID NO: 5363 - protein, 20 aa, Homo sapiens
VQQIQSNYDIAIAELHVQKS

SEQ ID NO: 5364 - protein, 20 aa, Homo sapiens
TMNKRYNVSQQALDLQNLRF

SEQ ID NO: 5365 - protein, 20 aa, Homo sapiens
YWRTSSFRMTEHNSVKPWQQ

SEQ ID NO: 5366 - protein, 20 aa, Homo sapiens
NRSLGQRQNSPLPFQWRITH

SEQ ID NO: 5367 - protein, 20 aa, Homo sapiens
RSWTYGITRGGRVFFINEEA

SEQ ID NO: 5368 - protein, 20 aa, Homo sapiens
KVLRSETVLDFMFNFYHQTE

SEQ ID NO: 5369 - protein, 20 aa, Homo sapiens
FKRANMDNDIALLLLASPIK

SEQ ID NO: 5370 - protein, 20 aa, Homo sapiens
RLQDFDKSNPIVLRMMNDQL

SEQ ID NO: 5371 - protein, 20 aa, Homo sapiens
KMENVQPAPDNVLLTLRPRR

SEQ ID NO: 5372 - protein, 20 aa, Homo sapiens
AATEAPKMSNADFAKLFLRK

SEQ ID NO: 5373 - protein, 20 aa, Homo sapiens
GGSGAVMSERVSGLAGSIYR

SEQ ID NO: 5374 - protein, 20 aa, Homo sapiens
NEVKRLLRSDAEAVSTRWEV

SEQ ID NO: 5375 - protein, 20 aa, Homo sapiens
NESVRPYTPFEVKIRSYNRR

SEQ ID NO: 5376 - protein, 20 aa, Homo sapiens
FQAENTIMLLERSIMAKEGP

SEQ ID NO: 5377 - protein, 20 aa, Homo sapiens
AYDPKHFHNRVVRIMIDDHN

SEQ ID NO: 5378 - protein, 20 aa, Homo sapiens
LVERREEAQRAQQAVPGPGP

SEQ ID NO: 5379 - protein, 20 aa, Homo sapiens
AQYRIHTHGVFRGIQDVRRV

SEQ ID NO: 5380 - protein, 20 aa, Homo sapiens
GRRDARSFVEAAGTTNFPAN

SEQ ID NO: 5381 - protein, 20 aa, Homo sapiens
SKIASEMAYEAVELTAAEMR

SEQ ID NO: 5382 - protein, 20 aa, Homo sapiens
MKGKGTRDKVLIRIMVSRSE

SEQ ID NO: 5383 - protein, 20 aa, Homo sapiens
SATEKVFKQQEIPSVFPKTS

SEQ ID NO: 5384 - protein, 20 aa, Homo sapiens
IKIGSEKSLHLEVEITSIVS

SEQ ID NO: 5385 - protein, 20 aa, Homo sapiens
ERPEIVSTWSSAGISWRSEA

SEQ ID NO: 5386 - protein, 20 aa, Homo sapiens
HKEKDKGLQTTQNGRFYAIS

SEQ ID NO: 5387 - protein, 20 aa, Homo sapiens
NQKSLFKDQKFEAMLVQQNR

SEQ ID NO: 5388 - protein, 20 aa, Homo sapiens
KTRSGKVFQNKMANGNQPVK

SEQ ID NO: 5389 - protein, 20 aa, Homo sapiens
IEEKSKLLEKFSLVQKEYEG

SEQ ID NO: 5390 - protein, 20 aa, Homo sapiens
GSSRGGGSGSGASDLGAGSK

SEQ ID NO: 5391 - protein, 20 aa, Homo sapiens
NSYNVRRTEGFSVTLDDLAP

SEQ ID NO: 5392 - protein, 20 aa, Homo sapiens
RPSRVHASEVESAVWYVKKF

SEQ ID NO: 5393 - protein, 20 aa, Homo sapiens
QLAEIDIKLQELSAASPTIS

SEQ ID NO: 5394 - protein, 20 aa, Homo sapiens
GSHHTASPWNLSPFSKTSIH

SEQ ID NO: 5395 - protein, 20 aa, Homo sapiens
FVNLKNITYLVLDEADKMLD

SEQ ID NO: 5396 - protein, 20 aa, Homo sapiens
GSVAGAVKLNRQQTDMAVNW

SEQ ID NO: 5397 - protein, 20 aa, Homo sapiens
TESVSHFSDLGQSFSFHSGN

SEQ ID NO: 5398 - protein, 20 aa, Homo sapiens
TVEYELKYRNIGSETWKTII

SEQ ID NO: 5399 - protein, 20 aa, Homo sapiens
HSVPKRQRIRKLQIRNIPPH

SEQ ID NO: 5400 - protein, 20 aa, Homo sapiens
FHPGGLMKLRSREADLYRFI

SEQ ID NO: 5401 - protein, 20 aa, Homo sapiens
RAHAETSKMKVLEYIANANG

SEQ ID NO: 5402 - protein, 20 aa, Homo sapiens
EEGPSTFPDLESEFQAALSR

SEQ ID NO: 5403 - protein, 20 aa, Homo sapiens
QIKEPVTKAEMLESVIKNYK

SEQ ID NO: 5404 - protein, 20 aa, Homo sapiens
KEPVTKAEMLESVIKNYKRY

SEQ ID NO: 5405 - protein, 20 aa, Homo sapiens
DGEEHSVFGEPWKLITKDLV

SEQ ID NO: 5406 - protein, 20 aa, Homo sapiens
STSTERSLKDSLTRKTKMLV

SEQ ID NO: 5407 - protein, 20 aa, Homo sapiens
QATIDTADDATVMASESLSV

SEQ ID NO: 5408 - protein, 20 aa, Homo sapiens
LDVQIQHVVEGKRALSELTQ

SEQ ID NO: 5409 - protein, 20 aa, Homo sapiens
ESLDQKLFQLQSKNMWLQQQ

SEQ ID NO: 5410 - protein, 20 aa, Homo sapiens
HKAEVEAIMEQLKELKQKGD

SEQ ID NO: 5411 - protein, 20 aa, Homo sapiens
TKYVFDSAPSHSISARTKAF

SEQ ID NO: 5412 - protein, 20 aa, Homo sapiens
SVHLAWDLSRSLGAVVFSRV

SEQ ID NO: 5413 - protein, 20 aa, Homo sapiens
NDLIEERYKASQDPFPAAII

SEQ ID NO: 5414 - protein, 20 aa, Homo sapiens
RGTTEIGMIGSKPFSTVKYK

SEQ ID NO: 5415 - protein, 20 aa, Homo sapiens
KRVNTRFFAQSGGRLQNPLP

SEQ ID NO: 5416 - protein, 20 aa, Homo sapiens
KTPKDSFTMSDGKEITFLEY

SEQ ID NO: 5417 - protein, 20 aa, Homo sapiens
PSVSQLSVLSLSGVMLTDVS

SEQ ID NO: 5418 - protein, 20 aa, Homo sapiens
YSEELFPEELSVVLGTNDLT

SEQ ID NO: 5419 - protein, 20 aa, Homo sapiens
KFSGYPLYHSVYETYELVEK

SEQ ID NO: 5420 - protein, 20 aa, Homo sapiens
RLNPHPNILMLHEVVFDRKS

SEQ ID NO: 5421 - protein, 20 aa, Homo sapiens
ELTKVRMARQKMSEIFPLTE

SEQ ID NO: 5422 - protein, 20 aa, Homo sapiens
ELEDIKVSLQRSVSTQKALE

SEQ ID NO: 5423 - protein, 20 aa, Homo sapiens
TGEGEFNFSEVFSPVEDHLD

SEQ ID NO: 5424 - protein, 20 aa, Homo sapiens
SILQEQISHLQFVIHSQHQN

SEQ ID NO: 5425 - protein, 20 aa, Homo sapiens
QQQEQIARQQQQLLQQQHKI

SEQ ID NO: 5426 - protein, 20 aa, Homo sapiens
IIEAKMELEEVTRLLNLKDK

SEQ ID NO: 5427 - protein, 20 aa, Homo sapiens
SSSLSIKWDPVVPFRNESAV

SEQ ID NO: 5428 - protein, 20 aa, Homo sapiens
QAIIQGFSYDLLKKIDSPQR

SEQ ID NO: 5429 - protein, 20 aa, Homo sapiens
HVSDHNRLLHLARPKAQSDK

SEQ ID NO: 5430 - protein, 20 aa, Homo sapiens
TVEKEMKSLARKAMDTESEL

SEQ ID NO: 5431 - protein, 20 aa, Homo sapiens
SAKEGTAFRMEAVQEGAAGV

SEQ ID NO: 5432 - protein, 20 aa, Homo sapiens
SVYADQVNIDYLMNRPQNLR

SEQ ID NO: 5433 - protein, 20 aa, Homo sapiens
FTSSRMSSFNRHMKTHTSEK

SEQ ID NO: 5434 - protein, 20 aa, Homo sapiens
KQQVFIDVINKLKENVEELI

SEQ ID NO: 5435 - protein, 20 aa, Homo sapiens
KKIEVYLRLHRHAYPEQRQD

SEQ ID NO: 5436 - protein, 20 aa, Homo sapiens
GSKLGRRAKPEGALQNNDGL

SEQ ID NO: 5437 - protein, 20 aa, Homo sapiens
SDTKDYFMSKTLGIGRLKRP

SEQ ID NO: 5438 - protein, 20 aa, Homo sapiens
KLHNINRPLTMKKEGIQTRN

SEQ ID NO: 5439 - protein, 20 aa, Homo sapiens
SVMDLVGSILKNLRRVHPVS

SEQ ID NO: 5440 - protein, 20 aa, Homo sapiens
QEESFSPTAMDAIFGSLSDE

SEQ ID NO: 5441 - protein, 20 aa, Homo sapiens
EDSVFAHPRKLLMQDLVQEN

SEQ ID NO: 5442 - protein, 20 aa, Homo sapiens
REALDEKVAELVRFLLRKYQ

SEQ ID NO: 5443 - protein, 20 aa, Homo sapiens
LQRPVSSFFSYTLASLLQSS

SEQ ID NO: 5444 - protein, 20 aa, Homo sapiens
ESLVEKTPDEAASLVEGTSD

SEQ ID NO: 5445 - protein, 20 aa, Homo sapiens
DWNLYWRTSSFRMTEHNSVK

SEQ ID NO: 5446 - protein, 20 aa, Homo sapiens
SARVRSRSRGRGDGQEAPDV

SEQ ID NO: 5447 - protein, 20 aa, Homo sapiens
YLTGLTDKMRNDFNVMKDLA

SEQ ID NO: 5448 - protein, 20 aa, Homo sapiens
ENPAMQEKKRSSIWQFFSRL

SEQ ID NO: 5449 - protein, 20 aa, Homo sapiens
NEQDLVREEAQKMSSLLPTM

SEQ ID NO: 5450 - protein, 20 aa, Homo sapiens
GFSYEQDPTLRDPEAVARRW

SEQ ID NO: 5451 - protein, 20 aa, Homo sapiens
RQLRLLFDQAYQMRPSIIFF

SEQ ID NO: 5452 - protein, 20 aa, Homo sapiens
GVVFLALSAQLLQARLMKEE

SEQ ID NO: 5453 - protein, 20 aa, Homo sapiens
RLLFSSSAAFAKFEITLFLS

SEQ ID NO: 5454 - protein, 20 aa, Homo sapiens
QQLESFQALRMQTLQNVSMV

SEQ ID NO: 5455 - protein, 20 aa, Homo sapiens
AQNTTYLWWVNGQSLPVSPR

SEQ ID NO: 5456 - protein, 20 aa, Homo sapiens
KKRSEELLSQVQFLYTSLLK

SEQ ID NO: 5457 - protein, 20 aa, Homo sapiens
HPLLGVSATLNSVLNSNAIK

SEQ ID NO: 5458 - protein, 20 aa, Homo sapiens
TGEELFFDYRYSQADALKYV

SEQ ID NO: 5459 - protein, 20 aa, Homo sapiens
MSWRGRSTYRPRPRRYVEPP

SEQ ID NO: 5460 - protein, 20 aa, Homo sapiens
EKRYLRMAVLTLYTDPMGSE

SEQ ID NO: 5461 - protein, 20 aa, Homo sapiens
AERNRVATMPVRLLRDSPAA

SEQ ID NO: 5462 - protein, 20 aa, Homo sapiens
SFFYVTETTFQKNRLFFYRK

SEQ ID NO: 5463 - protein, 20 aa, Homo sapiens
ANIRFSIWISFFEIYNELLY

SEQ ID NO: 5464 - protein, 20 aa, Homo sapiens
KAQNASKGIYAMASRDVFLL

SEQ ID NO: 5465 - protein, 20 aa, Homo sapiens
SQQNVSMDLATFMKLRTDAV

SEQ ID NO: 5466 - protein, 20 aa, Homo sapiens
DEERELEKLFQLGPPSPVKM

SEQ ID NO: 5467 - protein, 20 aa, Homo sapiens
STFQFLYTYIAKVDGEISAS

SEQ ID NO: 5468 - protein, 20 aa, Homo sapiens
QNIETLQNAGVMSLLRTLLL

SEQ ID NO: 5469 - protein, 20 aa, Homo sapiens
FRHGHRGLLTMQLKSPMPSS

SEQ ID NO: 5470 - protein, 20 aa, Homo sapiens
KMKSLEKISYVYMKRKYEAM

SEQ ID NO: 5471 - protein, 20 aa, Homo sapiens
GERVDVSKYLIKKGLALRER

SEQ ID NO: 5472 - protein, 20 aa, Homo sapiens
KKFAFVHISFAQFELSQGNV

SEQ ID NO: 5473 - protein, 20 aa, Homo sapiens
PKPEEKRFLLEEPMPFFYLK

SEQ ID NO: 5474 - protein, 20 aa, Homo sapiens
RTLNDWFSSMGIYVITGEGN

SEQ ID NO: 5475 - protein, 20 aa, Homo sapiens
IPPEQHTMVSLPSVQHMLQE

SEQ ID NO: 5476 - protein, 20 aa, Homo sapiens
SRQDQIHSSIVSTLLALMDG

SEQ ID NO: 5477 - protein, 20 aa, Homo sapiens
TALDVHFVSTLEPLSNAVKR

SEQ ID NO: 5478 - protein, 20 aa, Homo sapiens
WEQSLFSTTKPLFSSGQFSM

SEQ ID NO: 5479 - protein, 20 aa, Homo sapiens
LKFHSRVPRYTLSFLDQTKH

SEQ ID NO: 5480 - protein, 20 aa, Homo sapiens
AQYSWFVNGTFQQSTQELFI

SEQ ID NO: 5481 - protein, 20 aa, Homo sapiens
LTDKERHRLLEKIRVLEAEK

SEQ ID NO: 5482 - protein, 20 aa, Homo sapiens
STLDGYSRRTTLSSKMYHTK

SEQ ID NO: 5483 - protein, 20 aa, Homo sapiens
PRKFPSDKIFEAISSMFPDK

SEQ ID NO: 5484 - protein, 20 aa, Homo sapiens
KEPINVQVGFVSTGFHSMKV

SEQ ID NO: 5485 - protein, 20 aa, Homo sapiens
EELVVQVDGQWLMVTGQQQL

SEQ ID NO: 5486 - protein, 20 aa, Homo sapiens
QQVWKNPTFFLRVISDTASL

SEQ ID NO: 5487 - protein, 20 aa, Homo sapiens
DSMEKVKVYLRVRPLLPSEL

SEQ ID NO: 5488 - protein, 20 aa, Homo sapiens
ETASNEVVYRFTARPLVQTI

SEQ ID NO: 5489 - protein, 20 aa, Homo sapiens
DLPGRFVAESAEVLLPRLVS

SEQ ID NO: 5490 - protein, 20 aa, Homo sapiens
ESNLLQSPSSILSTLDVELP

SEQ ID NO: 5491 - protein, 20 aa, Homo sapiens
IRVQPQDLIQWAADYFEALS

SEQ ID NO: 5492 - protein, 20 aa, Homo sapiens
VKEAAAWALRYIARHNAELS

SEQ ID NO: 5493 - protein, 20 aa, Homo sapiens
MQDGSESFFFRHGHRGLLTM

SEQ ID NO: 5494 - protein, 20 aa, Homo sapiens
RLQRIFPKIMPKKPAEEGND

SEQ ID NO: 5495 - protein, 20 aa, Homo sapiens
LNAAMNIARALQLSPSLRTY

SEQ ID NO: 5496 - protein, 20 aa, Homo sapiens
LYYMTYGKTPFQQIINQISK

SEQ ID NO: 5497 - protein, 20 aa, Homo sapiens
LVVALPRVWTDANLTARQRD

SEQ ID NO: 5498 - protein, 20 aa, Homo sapiens
KLVFRNGDAIEFAQLMVKAA

SEQ ID NO: 5499 - protein, 20 aa, Homo sapiens
ELSLSLPFPIQWETVSIFTR

SEQ ID NO: 5500 - protein, 20 aa, Homo sapiens
KKSQNYNIFQLENLYAVISQ

SEQ ID NO: 5501 - protein, 20 aa, Homo sapiens
FVQNTLTKLLKDRRKMQTVQ

SEQ ID NO: 5502 - protein, 20 aa, Homo sapiens
EHTTGQLTTMNRQIAVKVEK

SEQ ID NO: 5503 - protein, 20 aa, Homo sapiens
SIEMEAMKTNILLIQDEKEM

SEQ ID NO: 5504 - protein, 20 aa, Homo sapiens
AYSGREIIYPNASLLIQNII

SEQ ID NO: 5505 - protein, 20 aa, Homo sapiens
LRDQLKARYSTTTLLEQLEE

SEQ ID NO: 5506 - protein, 20 aa, Homo sapiens
LNSVLNSNAIKNLPPPLGGA

SEQ ID NO: 5507 - protein, 20 aa, Homo sapiens
KTLNAVASVPIMYSWSPLQQ

SEQ ID NO: 5508 - protein, 20 aa, Homo sapiens
LIRKLYILMQDLEPLPNNVV

SEQ ID NO: 5509 - protein, 20 aa, Homo sapiens
RVSYRMSQKVHRKMLPSNLS

SEQ ID NO: 5510 - protein, 20 aa, Homo sapiens
RVKALFSVLNYERARRPGLL

SEQ ID NO: 5511 - protein, 20 aa, Homo sapiens
STYDETLHVAKFSAIASQLV

SEQ ID NO: 5512 - protein, 20 aa, Homo sapiens
ILRAKGRMHGKFSLVDLAGN

SEQ ID NO: 5513 - protein, 20 aa, Homo sapiens
LAFQNMNGSEYFVKIQSFLG

SEQ ID NO: 5514 - protein, 20 aa, Homo sapiens
DAYPEIEKFFPFNPLDFESF

SEQ ID NO: 5515 - protein, 20 aa, Homo sapiens
GEISASHVSRMLNYMEQEVI

SEQ ID NO: 5516 - protein, 20 aa, Homo sapiens
SLAEQNRFYKKAAAFVLRAV

SEQ ID NO: 5517 - protein, 20 aa, Homo sapiens
IPPGFRNLVADRVPNYTSWS

SEQ ID NO: 5518 - protein, 20 aa, Homo sapiens
KHAWTHRLRERKQLVIYEEI

SEQ ID NO: 5519 - protein, 20 aa, Homo sapiens
NPWEKLSIHLYFDGMSLSYF

SEQ ID NO: 5520 - protein, 20 aa, Homo sapiens
NQTLDSYRNEIAYLNKLQQH

SEQ ID NO: 5521 - protein, 20 aa, Homo sapiens
KAASAAARGFPLRTLNDWFS

SEQ ID NO: 5522 - protein, 20 aa, Homo sapiens
QDVVTPNSVRSQVPALTTTY

SEQ ID NO: 5523 - protein, 20 aa, Homo sapiens
VEKALAILSQPTPSLVVDHE

SEQ ID NO: 5524 - protein, 20 aa, Homo sapiens
AQLLQARLMKEESPVVSWRL

SEQ ID NO: 5525 - protein, 20 aa, Homo sapiens
PVQNDLAYANDFASEYYLES

SEQ ID NO: 5526 - protein, 20 aa, Homo sapiens
NSDILKNYNNFYRFLPTAPP

SEQ ID NO: 5527 - protein, 20 aa, Homo sapiens
TQDATYLWWVNNQSLPVSPR

SEQ ID NO: 5528 - protein, 20 aa, Homo sapiens
LESLKQLHEFAITEPLVTFQ

SEQ ID NO: 5529 - protein, 20 aa, Homo sapiens
SFGNDHSTLDGYSRRTTLSS

SEQ ID NO: 5530 - protein, 20 aa, Homo sapiens
FRRADEVKSMFSSNRQKILE

SEQ ID NO: 5531 - protein, 20 aa, Homo sapiens
KEGVNSHFLLFDKEPINVQV

SEQ ID NO: 5532 - protein, 20 aa, Homo sapiens
EDNDHARDGFQMKLDAHGFA

SEQ ID NO: 5533 - protein, 20 aa, Homo sapiens
EAFTTSVRSYLPNTVTDALR

SEQ ID NO: 5534 - protein, 20 aa, Homo sapiens
FPSLHSFIKEHSLQVSPSLE

SEQ ID NO: 5535 - protein, 20 aa, Homo sapiens
MAMDSSLQARLFPGLAIKIQ

SEQ ID NO: 5536 - protein, 20 aa, Homo sapiens
ATQMDRVNAIPFTYEQLDVL

SEQ ID NO: 5537 - protein, 20 aa, Homo sapiens
QIAHLPLSGVPLMILDEERE

SEQ ID NO: 5538 - protein, 20 aa, Homo sapiens
IRAEELAQMWKVVNLPTDLF

SEQ ID NO: 5539 - protein, 20 aa, Homo sapiens
DILPQLVYSLAEQNRFYKKA

SEQ ID NO: 5540 - protein, 20 aa, Homo sapiens
DYRQEQPETFWIQRAPQLPV

SEQ ID NO: 5541 - protein, 20 aa, Homo sapiens
ISYVYMKRKYEAMTKLGFKA

SEQ ID NO: 5542 - protein, 20 aa, Homo sapiens
WEEEAKVEFLKMVNNKAVSM

SEQ ID NO: 5543 - protein, 20 aa, Homo sapiens
PYVQIQTHPVNQMAKGTTEE

SEQ ID NO: 5544 - protein, 20 aa, Homo sapiens
NGDAIEFAQLMVKAASAAAR

SEQ ID NO: 5545 - protein, 20 aa, Homo sapiens
EYNKEGKYYSKGVKLVRKKK

SEQ ID NO: 5546 - protein, 20 aa, Homo sapiens
GSSVKEVETYHRTRALRSLR

SEQ ID NO: 5547 - protein, 20 aa, Homo sapiens
EPEDGTALDVHFVSTLEPLS

SEQ ID NO: 5548 - protein, 20 aa, Homo sapiens
EWSDDQAVFTFVYDTIQLTI

SEQ ID NO: 5549 - protein, 20 aa, Homo sapiens
NPQFSSEKNLVFGTRIEKDL

SEQ ID NO: 5550 - protein, 20 aa, Homo sapiens
DDPTISPSYTYYRPGVNLSL

SEQ ID NO: 5551 - protein, 20 aa, Homo sapiens
QQWLVYDQQREVYVKGLLAK

SEQ ID NO: 5552 - protein, 20 aa, Homo sapiens
GFINDEIFVELVNALGQYND

SEQ ID NO: 5553 - protein, 20 aa, Homo sapiens
EKVTEMYQFKFKYTKEGATM

SEQ ID NO: 5554 - protein, 20 aa, Homo sapiens
ERNRVATMPVRLLRDSPAAQ

SEQ ID NO: 5555 - protein, 20 aa, Homo sapiens
TLTDLQPYMRQFVAHLQETS

SEQ ID NO: 5556 - protein, 20 aa, Homo sapiens
IAEQYHTVLKLQGQVSAKKR

SEQ ID NO: 5557 - protein, 20 aa, Homo sapiens
EVYVTFFEIYNGKLFDLLNK

SEQ ID NO: 5558 - protein, 20 aa, Homo sapiens
YPESVIQHLGYLFLKMSPED

SEQ ID NO: 5559 - protein, 20 aa, Homo sapiens
GLKLGSGPSIKALDGRSQVS

SEQ ID NO: 5560 - protein, 20 aa, Homo sapiens
LHSQVAGRLIIRAEELAQMW

SEQ ID NO: 5561 - protein, 20 aa, Homo sapiens
AHSENLAMAVIISKGVPQLS

SEQ ID NO: 5562 - protein, 20 aa, Homo sapiens
SSDDSPRSALAAATAAAAAA

SEQ ID NO: 5563 - protein, 20 aa, Homo sapiens
PEKIQKSFDDIAKYFSKKEW

SEQ ID NO: 5564 - protein, 20 aa, Homo sapiens
VVEKQFDQLLAFFDSRKKNL

SEQ ID NO: 5565 - protein, 20 aa, Homo sapiens
WERKSYWKNMLEAVHTIHQH

SEQ ID NO: 5566 - protein, 20 aa, Homo sapiens
SNVFSGRKTGTLFLTSYRVI

SEQ ID NO: 5567 - protein, 20 aa, Homo sapiens
KRTYLSQKSLQAHIKRRHKR

SEQ ID NO: 5568 - protein, 20 aa, Homo sapiens
PASPARPRYRLSSAGPRSPY

SEQ ID NO: 5569 - protein, 20 aa, Homo sapiens
LQARLMKEESPVVSWRLEPE

SEQ ID NO: 5570 - protein, 20 aa, Homo sapiens
NQDARILAMTPESIYSNPSI

SEQ ID NO: 5571 - protein, 20 aa, Homo sapiens
LEALVKKLLPFRETVSKFHV

SEQ ID NO: 5572 - protein, 20 aa, Homo sapiens
SASGHSRTTVKTITVSAELP

SEQ ID NO: 5573 - protein, 20 aa, Homo sapiens
EEKDVLKQQLSAATSRIAEL

SEQ ID NO: 5574 - protein, 20 aa, Homo sapiens
LQQNFMVEDETVLHNIPYMG

SEQ ID NO: 5575 - protein, 20 aa, Homo sapiens
QDLEPLPNNVVLTMKLHYYN

SEQ ID NO: 5576 - protein, 20 aa, Homo sapiens
VVQVDGQWLMVTGQQQLDVR

SEQ ID NO: 5577 - protein, 20 aa, Homo sapiens
LGLDDIHRAWRTFVLRVRAQ

SEQ ID NO: 5578 - protein, 20 aa, Homo sapiens
ILIKQDQTLAELQNNMVLVK

SEQ ID NO: 5579 - protein, 20 aa, Homo sapiens
FVNKAESALAQQAKHFSALR

SEQ ID NO: 5580 - protein, 20 aa, Homo sapiens
LSTERVRELAVALAQKNVKL

SEQ ID NO: 5581 - protein, 20 aa, Homo sapiens
NLLQSPSSILSTLDVELPPV

SEQ ID NO: 5582 - protein, 20 aa, Homo sapiens
NRAELTPELLKILHSQVAGR

SEQ ID NO: 5583 - protein, 20 aa, Homo sapiens
LQVFEQYQKARTQFVQMVAE

SEQ ID NO: 5584 - protein, 20 aa, Homo sapiens
PQKQPPWEFLQVLEPGARGL

SEQ ID NO: 5585 - protein, 20 aa, Homo sapiens
THRLRERKQLVIYEEISDPE

SEQ ID NO: 5586 - protein, 20 aa, Homo sapiens
VPKLSEFELIKMTNEIQSNL

SEQ ID NO: 5587 - protein, 20 aa, Homo sapiens
GQNESFARIQVRFAELKAIQ

SEQ ID NO: 5588 - protein, 20 aa, Homo sapiens
GWEGQATFKLVFRNGDAIEF

SEQ ID NO: 5589 - protein, 20 aa, Homo sapiens
SLSLPFPIQWETVSIFTRKH

SEQ ID NO: 5590 - protein, 20 aa, Homo sapiens
REDKVIPVTRSLRARNIVQS

SEQ ID NO: 5591 - protein, 20 aa, Homo sapiens
TPEDLMLSQYVYRPKIQIYR

SEQ ID NO: 5592 - protein, 20 aa, Homo sapiens
FHSRVPRYTLSFLDQTKHEM

SEQ ID NO: 5593 - protein, 20 aa, Homo sapiens
IIQNDTGFYTLHVIKSDLVN

SEQ ID NO: 5594 - protein, 20 aa, Homo sapiens
VERQTITQLSFELSEFRRKY

SEQ ID NO: 5595 - protein, 20 aa, Homo sapiens
WRKRVKSEYMRLRQLKRFRR

SEQ ID NO: 5596 - protein, 20 aa, Homo sapiens
DYQPLGFKEGVNSHFLLFDK

SEQ ID NO: 5597 - protein, 20 aa, Homo sapiens
QQQLDVRDPERVSYRMSQKV

SEQ ID NO: 5598 - protein, 20 aa, Homo sapiens
DYSSYARTSIRASLTFNRGF

SEQ ID NO: 5599 - protein, 20 aa, Homo sapiens
SPYARILRSRRSPLLKSGPF

SEQ ID NO: 5600 - protein, 20 aa, Homo sapiens
PKESLRSRSTRMSTVSELRI

SEQ ID NO: 5601 - protein, 20 aa, Homo sapiens
DRVNAIPFTYEQLDVLKHKL

SEQ ID NO: 5602 - protein, 20 aa, Homo sapiens
PALPKATRKALGTVNRATEK

SEQ ID NO: 5603 - protein, 20 aa, Homo sapiens
SVMNVGRFTEEIEWLKFLAL

SEQ ID NO: 5604 - protein, 20 aa, Homo sapiens
PTIQQTAALALGRLANYNDD

SEQ ID NO: 5605 - protein, 20 aa, Homo sapiens
GSESFFFRHGHRGLLTMQLK

SEQ ID NO: 5606 - protein, 20 aa, Homo sapiens
SGPKRGKHAWTHRLRERKQL

SEQ ID NO: 5607 - protein, 20 aa, Homo sapiens
KIVAIKEFNPLSILVQFVDY

SEQ ID NO: 5608 - protein, 20 aa, Homo sapiens
LSDALLNKLIGRYSQAIEAL

SEQ ID NO: 5609 - protein, 20 aa, Homo sapiens
ALIPNGESLLKRSPNVELSF

SEQ ID NO: 5610 - protein, 20 aa, Homo sapiens
DIQAPPPELSLSLPFPIQWE

SEQ ID NO: 5611 - protein, 20 aa, Homo sapiens
KRYYLRQRKATVYYQAPLEK

SEQ ID NO: 5612 - protein, 20 aa, Homo sapiens
PHVSKERIQQSLSNPLSISL

SEQ ID NO: 5613 - protein, 20 aa, Homo sapiens
LKEFKKIISKYNVLQGQNKT

SEQ ID NO: 5614 - protein, 20 aa, Homo sapiens
PRLQLSNDNRTLTLLSVTRN

SEQ ID NO: 5615 - protein, 20 aa, Homo sapiens
HQLHVILKELRKARNQITQL

SEQ ID NO: 5616 - protein, 20 aa, Homo sapiens
GPNAKSVQREQSLHSFHTLF

SEQ ID NO: 5617 - protein, 20 aa, Homo sapiens
STGFHSMKVKVMTEATKVID

SEQ ID NO: 5618 - protein, 20 aa, Homo sapiens
YRMSQKVHRKMLPSNLSPTA

SEQ ID NO: 5619 - protein, 20 aa, Homo sapiens
RLPRLPQRYWQMRPLFLELL

SEQ ID NO: 5620 - protein, 20 aa, Homo sapiens
DGGILPRSLALIFNSLQGQL

SEQ ID NO: 5621 - protein, 20 aa, Homo sapiens
DSSFPNWEFARMIKEFRATL

SEQ ID NO: 5622 - protein, 20 aa, Homo sapiens
LLATQMDRVNAIPFTYEQLD

SEQ ID NO: 5623 - protein, 20 aa, Homo sapiens
KMTEKTVKAKSSVPASDDAY

SEQ ID NO: 5624 - protein, 20 aa, Homo sapiens
KMLKEFAKAAIRVQPQDLIQ

SEQ ID NO: 5625 - protein, 20 aa, Homo sapiens
IQEPEIALKRIAASALSDIA

SEQ ID NO: 5626 - protein, 20 aa, Homo sapiens
RKLFEVESVTHHDYRMELAQ

SEQ ID NO: 5627 - protein, 20 aa, Homo sapiens
MNGDDAFARRPRAGAQIPEK

SEQ ID NO: 5628 - protein, 20 aa, Homo sapiens
RRGQIIRMVTDTLVEVLLYD

SEQ ID NO: 5629 - protein, 20 aa, Homo sapiens
KIIRLYDYEITDQYIYMVME

SEQ ID NO: 5630 - protein, 20 aa, Homo sapiens
HTENRRGALIPNGESLLKRS

SEQ ID NO: 5631 - protein, 20 aa, Homo sapiens
TTYDPSSGYIIVKVPPDMNS

SEQ ID NO: 5632 - protein, 20 aa, Homo sapiens
SSSKYAPSYYHVMPKQNSTL

SEQ ID NO: 5633 - protein, 20 aa, Homo sapiens
QLNNRDRRNVDFTSSHATAV

SEQ ID NO: 5634 - protein, 20 aa, Homo sapiens
MSQADTVILDKSKITVPFLK

SEQ ID NO: 5635 - protein, 20 aa, Homo sapiens
QQHTQVLFIAKITPNNNGTY

SEQ ID NO: 5636 - protein, 20 aa, Homo sapiens
VYDQQREVYVKGLLAKIFEL

SEQ ID NO: 5637 - protein, 20 aa, Homo sapiens
YQHLEGAKEFAAALTAERIK

SEQ ID NO: 5638 - protein, 20 aa, Homo sapiens
IKKASVLLIRKLYILMQDLE

SEQ ID NO: 5639 - protein, 20 aa, Homo sapiens
RSLLRSHYREVLPLATFVRR

SEQ ID NO: 5640 - protein, 20 aa, Homo sapiens
LNQNSSRSHSIFSIRILHLQ

SEQ ID NO: 5641 - protein, 20 aa, Homo sapiens
AKHFSALRDVIKALRLAMQL

SEQ ID NO: 5642 - protein, 20 aa, Homo sapiens
RQLDVLYPKARLAFQNMNGS

SEQ ID NO: 5643 - protein, 20 aa, Homo sapiens
SQVSTPRFGKTFDAPPALPK

SEQ ID NO: 5644 - protein, 20 aa, Homo sapiens
PELLKILHSQVAGRLIIRAE

SEQ ID NO: 5645 - protein, 20 aa, Homo sapiens
LKDKDEYVKKNASTLIREIA

SEQ ID NO: 5646 - protein, 20 aa, Homo sapiens
FEVESVTHHDYRMELAQAGT

SEQ ID NO: 5647 - protein, 20 aa, Homo sapiens
DIAKYFSKKEWEKMKSLEKI

SEQ ID NO: 5648 - protein, 20 aa, Homo sapiens
RSHFEKNTTLHYHPPILPKE

SEQ ID NO: 5649 - protein, 20 aa, Homo sapiens
IGSGGSSKVFQVLNEKKQIY

SEQ ID NO: 5650 - protein, 20 aa, Homo sapiens
GGWEGQATFKLVFRNGDAIE

SEQ ID NO: 5651 - protein, 20 aa, Homo sapiens
SASEFASHHYNLNILPQFTE

SEQ ID NO: 5652 - protein, 20 aa, Homo sapiens
QEEDTFRELRIFLRNVTHRL

SEQ ID NO: 5653 - protein, 20 aa, Homo sapiens
RPMDKTVVFVDNHVELEMTE

SEQ ID NO: 5654 - protein, 20 aa, Homo sapiens
LQNVSMVQSEISEILNKSII

SEQ ID NO: 5655 - protein, 20 aa, Homo sapiens
PPAQYSWLIDGNIQQHTQEL

SEQ ID NO: 5656 - protein, 20 aa, Homo sapiens
EVHNLNQLLYSQRRADVQHL

SEQ ID NO: 5657 - protein, 20 aa, Homo sapiens
EWKQRRIQPVHILTSVSSLR

SEQ ID NO: 5658 - protein, 20 aa, Homo sapiens
KRYLRMAVLTLYTDPMGSEK

SEQ ID NO: 5659 - protein, 20 aa, Homo sapiens
GLLLDTRTLEVQSDYSSYAR

SEQ ID NO: 5660 - protein, 20 aa, Homo sapiens
TVKEMVKDVLKGQNWLIYTY

SEQ ID NO: 5661 - protein, 20 aa, Homo sapiens
EELSSQMSSFNEAMTQIREL

SEQ ID NO: 5662 - protein, 20 aa, Homo sapiens
QGGIPNGYLVLDLSMQEALS

SEQ ID NO: 5663 - protein, 20 aa, Homo sapiens
AHLPLSGVPLMILDEERELE

SEQ ID NO: 5664 - protein, 20 aa, Homo sapiens
GPDGIITVNDFTQNPRVQLE

SEQ ID NO: 5665 - protein, 20 aa, Homo sapiens
LPHDSKARRLFVTSGGLKKV

SEQ ID NO: 5666 - protein, 20 aa, Homo sapiens
SYQPPGNVYWPLRGKREAML

SEQ ID NO: 5667 - protein, 20 aa, Homo sapiens
SSDMPVSLRDALVFMELAKF

SEQ ID NO: 5668 - protein, 20 aa, Homo sapiens
KAVERGAVPLEMLEIALRNL

SEQ ID NO: 5669 - protein, 20 aa, Homo sapiens
WEGQATFKLVFRNGDAIEFA

SEQ ID NO: 5670 - protein, 20 aa, Homo sapiens
PQFTQTDAMDHRRWPAWKRL

SEQ ID NO: 5671 - protein, 20 aa, Homo sapiens
AVLQKMDDMKKMRRQRMREL

SEQ ID NO: 5672 - protein, 20 aa, Homo sapiens
EKSTKIDTTSFLANLKLHTE

SEQ ID NO: 5673 - protein, 20 aa, Homo sapiens
LKNYNNFYRFLPTAPPNVMS

SEQ ID NO: 5674 - protein, 20 aa, Homo sapiens
NGNRTLTLFNVTRNDTASYK

SEQ ID NO: 5675 - protein, 20 aa, Homo sapiens
FNSSINNIHEMEIQLKDALE

SEQ ID NO: 5676 - protein, 20 aa, Homo sapiens
NGDHRIGIFAKRAIQTGEEL

SEQ ID NO: 5677 - protein, 20 aa, Homo sapiens
ITNEHESLKMVKKLFATSIS

SEQ ID NO: 5678 - protein, 20 aa, Homo sapiens
DKEQLRPSFLLSSLRPSLTG

SEQ ID NO: 5679 - protein, 20 aa, Homo sapiens
SELALRRSQRLAASASTQQL

SEQ ID NO: 5680 - protein, 20 aa, Homo sapiens
ITAQENDMEVELPAAANSRK

SEQ ID NO: 5681 - protein, 20 aa, Homo sapiens
EDLDALPLDLLLFLNPDAFS

SEQ ID NO: 5682 - protein, 20 aa, Homo sapiens
SQVAGRLIIRAEELAQMWKV

SEQ ID NO: 5683 - protein, 20 aa, Homo sapiens
YPEEIVRYYSPGYSDTLLQR

SEQ ID NO: 5684 - protein, 20 aa, Homo sapiens
ESTEGSRSRSRSLDIQPSSE

SEQ ID NO: 5685 - protein, 20 aa, Homo sapiens
KSLPNENFQSLYNKELPVHI

SEQ ID NO: 5686 - protein, 20 aa, Homo sapiens
FQQQQHQILATPLQNLQVLA

SEQ ID NO: 5687 - protein, 20 aa, Homo sapiens
ASAAARGFPLRTLNDWFSSM

SEQ ID NO: 5688 - protein, 20 aa, Homo sapiens
RTYLSQKSLQAHIKRRHKRA

SEQ ID NO: 5689 - protein, 20 aa, Homo sapiens
KWVGESERQLRLLFDQAYQM

SEQ ID NO: 5690 - protein, 20 aa, Homo sapiens
KVFTHQGKVALYGKLVQSAQ

SEQ ID NO: 5691 - protein, 20 aa, Homo sapiens
KQHREEDEVDSVLLSASKIL

SEQ ID NO: 5692 - protein, 20 aa, Homo sapiens
ATYLWWVNNQSLPVSPRLQL

SEQ ID NO: 5693 - protein, 20 aa, Homo sapiens
LLKQQEEQTRVALLEQQMQA

SEQ ID NO: 5694 - protein, 20 aa, Homo sapiens
SDLDFPTQVIPLKTLNAVAS

SEQ ID NO: 5695 - protein, 20 aa, Homo sapiens
SYGERHLDDLSLKILREDKK

SEQ ID NO: 5696 - protein, 20 aa, Homo sapiens
LRDAVVIEQSSSLNEASSGL

SEQ ID NO: 5697 - protein, 20 aa, Homo sapiens
PPMQLGFPSLHSFIKEHSLQ

SEQ ID NO: 5698 - protein, 20 aa, Homo sapiens
SLQARLFPGLAIKIQRSNGL

SEQ ID NO: 5699 - protein, 20 aa, Homo sapiens
TRFFSRITKANVDLLPRGAP

SEQ ID NO: 5700 - protein, 20 aa, Homo sapiens
MWKVVNLPTDLFNSVMNVGR

SEQ ID NO: 5701 - protein, 20 aa, Homo sapiens
AVTNTLPVLLSLYMSTESSE

SEQ ID NO: 5702 - protein, 20 aa, Homo sapiens
YWPLRGKREAMLEMLLQHQI

SEQ ID NO: 5703 - protein, 20 aa, Homo sapiens
KFEDGIWYRAKVIGLPGHQE

SEQ ID NO: 5704 - protein, 20 aa, Homo sapiens
EDLSGRELTIDSIMNKVRDI

SEQ ID NO: 5705 - protein, 20 aa, Homo sapiens
NEGPPAGYRASPAGSGARPQ

SEQ ID NO: 5706 - protein, 20 aa, Homo sapiens
RDHLSYIPPEQHTMVSLPSV

SEQ ID NO: 5707 - protein, 20 aa, Homo sapiens
VLRMTRARRSQVEQQQLITV

SEQ ID NO: 5708 - protein, 20 aa, Homo sapiens
TIREFFILLQVHILIQKPRQ

SEQ ID NO: 5709 - protein, 20 aa, Homo sapiens
AKIQYLQNYLKESVQIQKKV

SEQ ID NO: 5710 - protein, 20 aa, Homo sapiens
TPIISPPDSSYLSGANLNLS

SEQ ID NO: 5711 - protein, 20 aa, Homo sapiens
KLDRQHVQHQLHVILKELRK

SEQ ID NO: 5712 - protein, 20 aa, Homo sapiens
KVMMVNGDHRIGIFAKRAIQ

SEQ ID NO: 5713 - protein, 20 aa, Homo sapiens
GFHSMKVKVMTEATKVIDLE

SEQ ID NO: 5714 - protein, 20 aa, Homo sapiens
DTDPRRLVQLLRQHSSPWQV

SEQ ID NO: 5715 - protein, 20 aa, Homo sapiens
VGQASFFNLTVKEMVKDVLK

SEQ ID NO: 5716 - protein, 20 aa, Homo sapiens
FQIILRAKGRMHGKFSLVDL

SEQ ID NO: 5717 - protein, 20 aa, Homo sapiens
DVLYPKARLAFQNMNGSEYF

SEQ ID NO: 5718 - protein, 20 aa, Homo sapiens
EDFDPGVKEAAAWALRYIAR

SEQ ID NO: 5719 - protein, 20 aa, Homo sapiens
ATAVNTRQRYYPMAGYIKED

SEQ ID NO: 5720 - protein, 20 aa, Homo sapiens
VSDEKSSELIITDSITLKNK

SEQ ID NO: 5721 - protein, 20 aa, Homo sapiens
PQRSEGSNVFSGRKTGTLFL

SEQ ID NO: 5722 - protein, 20 aa, Homo sapiens
IKRRHKRARKQVTSASLEKV

SEQ ID NO: 5723 - protein, 20 aa, Homo sapiens
ASLADVDPMQLDSSVRFDSV

SEQ ID NO: 5724 - protein, 20 aa, Homo sapiens
EITGMNTLLSAPIHTQMQQK

SEQ ID NO: 5725 - protein, 20 aa, Homo sapiens
KDKERQPFLVKQGSIISENE

SEQ ID NO: 5726 - protein, 20 aa, Homo sapiens
ERVDGNRQIIGYVIGTQQAT

SEQ ID NO: 5727 - protein, 20 aa, Homo sapiens
EKVAASPKSPTAALNESLVE

SEQ ID NO: 5728 - protein, 20 aa, Homo sapiens
EWSGAEASMFRVLIGTYYDN

SEQ ID NO: 5729 - protein, 20 aa, Homo sapiens
VKVMTEATKVIDLENNLFRE

SEQ ID NO: 5730 - protein, 20 aa, Homo sapiens
EHRLREEILAKFLHWLMSVY

SEQ ID NO: 5731 - protein, 20 aa, Homo sapiens
ERGIGQATHRFTFSQIFGPE

SEQ ID NO: 5732 - protein, 20 aa, Homo sapiens
EYTLNTLRYADRVKELSPHS

SEQ ID NO: 5733 - protein, 20 aa, Homo sapiens
EDIRKWNVTSLETLKALLEV

SEQ ID NO: 5734 - protein, 20 aa, Homo sapiens
AWALRYIARHNAELSQAVVD

SEQ ID NO: 5735 - protein, 20 aa, Homo sapiens
LERSASTDKTLLNSSAVMLD

SEQ ID NO: 5736 - protein, 20 aa, Homo sapiens
ELRNLKSVQNSHFKEPLVSD

SEQ ID NO: 5737 - protein, 20 aa, Homo sapiens
ESTAAQAPENEASLPSASSS

SEQ ID NO: 5738 - protein, 20 aa, Homo sapiens
PIQWETVSIFTRKHGNLTVD

SEQ ID NO: 5739 - protein, 20 aa, Homo sapiens
YQMRPSIIFFDEIDGLAPVR

SEQ ID NO: 5740 - protein, 20 aa, Homo sapiens
KNDMDITKSYTIEINHRPLL

SEQ ID NO: 5741 - protein, 20 aa, Homo sapiens
RPLASDLKGYFKVKDRTLKH

SEQ ID NO: 5742 - protein, 20 aa, Homo sapiens
GIQNELSVDHSDPVILNVLY

SEQ ID NO: 5743 - protein, 20 aa, Homo sapiens
KSETTLEKLKGEIAHLKTSV

SEQ ID NO: 5744 - protein, 20 aa, Homo sapiens
VEDETVLHNIPYMGDEVLDQ

SEQ ID NO: 5745 - protein, 20 aa, Homo sapiens
ITYLRGLFPESSYGERHLDD

SEQ ID NO: 5746 - protein, 20 aa, Homo sapiens
REKRAERLTSRVKALFSVLN

SEQ ID NO: 5747 - protein, 20 aa, Homo sapiens
KLNILKESLTSFYQEEIQER

SEQ ID NO: 5748 - protein, 20 aa, Homo sapiens
ESALAQQAKHFSALRDVIKA

SEQ ID NO: 5749 - protein, 20 aa, Homo sapiens
EDLKALSQQNVSMDLATFMK

SEQ ID NO: 5750 - protein, 20 aa, Homo sapiens
PPNILKHVVGQFSKVLPHDS

SEQ ID NO: 5751 - protein, 20 aa, Homo sapiens
KLAYIEPYKRTMQWSKEAKE

SEQ ID NO: 5752 - protein, 20 aa, Homo sapiens
SGTVNQIMMMANNPEDWLSL

SEQ ID NO: 5753 - protein, 20 aa, Homo sapiens
KEERTKFFEDLILKQAAKPP

SEQ ID NO: 5754 - protein, 20 aa, Homo sapiens
QAPPSSLLVHKLIFQYVEEK

SEQ ID NO: 5755 - protein, 20 aa, Homo sapiens
NLKSKMKPLIFTTQSLIQKV

SEQ ID NO: 5756 - protein, 20 aa, Homo sapiens
FVSNLATGRNNSIVKSITVS

SEQ ID NO: 5757 - protein, 20 aa, Homo sapiens
RDQLKARYSTTTLLEQLEET

SEQ ID NO: 5758 - protein, 20 aa, Homo sapiens
SFLFNLNNDFVVDATRKGNK

SEQ ID NO: 5759 - protein, 20 aa, Homo sapiens
VTEMYQFKFKYTKEGATMDF

SEQ ID NO: 5760 - protein, 20 aa, Homo sapiens
FQKNRLFFYRKSVWSKLQSI

SEQ ID NO: 5761 - protein, 20 aa, Homo sapiens
KQIRQEEMKKLSLLNGGLQE

SEQ ID NO: 5762 - protein, 20 aa, Homo sapiens
RAKGRMHGKFSLVDLAGNER

SEQ ID NO: 5763 - protein, 20 aa, Homo sapiens
TVAEVQKLLGPHVEGLKAEE

SEQ ID NO: 5764 - protein, 20 aa, Homo sapiens
LNPDAKLKHQILSALSQVSK

SEQ ID NO: 5765 - protein, 20 aa, Homo sapiens
SDILELGARIFVSSIKNGMW

SEQ ID NO: 5766 - protein, 20 aa, Homo sapiens
TYGKTPFQQIINQISKLHAI

SEQ ID NO: 5767 - protein, 20 aa, Homo sapiens
LHNHSAASATGSLDLSSDFL

SEQ ID NO: 5768 - protein, 20 aa, Homo sapiens
SFADTIKVFQTESHMKIVRK

SEQ ID NO: 5769 - protein, 20 aa, Homo sapiens
TLEFEMRHLQREYLSLSDKI

SEQ ID NO: 5770 - protein, 20 aa, Homo sapiens
QHTQELFISNITEKNSGLYT

SEQ ID NO: 5771 - protein, 20 aa, Homo sapiens
IAELESKTNTLRLSQTVAPN

SEQ ID NO: 5772 - protein, 20 aa, Homo sapiens
VYEFRVKESSIIAPAPAEDV

SEQ ID NO: 5773 - protein, 20 aa, Homo sapiens
RTLEVQSDYSSYARTSIRAS

SEQ ID NO: 5774 - protein, 20 aa, Homo sapiens
QATHRFTFSQIFGPEVGQAS

SEQ ID NO: 5775 - protein, 20 aa, Homo sapiens
QPDYDLETFVNKAESALAQQ

SEQ ID NO: 5776 - protein, 20 aa, Homo sapiens
GVLANPPNISSLSPRQLLGF

SEQ ID NO: 5777 - protein, 20 aa, Homo sapiens
VAELATRPQNIETLQNAGVM

SEQ ID NO: 5778 - protein, 20 aa, Homo sapiens
QLIEGLDILFLLKTIEEFYK

SEQ ID NO: 5779 - protein, 20 aa, Homo sapiens
DPKQRISIPELLAHPYVQIQ

SEQ ID NO: 5780 - protein, 20 aa, Homo sapiens
RRSQVEQQQLITVEKALAIL

SEQ ID NO: 5781 - protein, 20 aa, Homo sapiens
YSQDLGEMTKLNSKRVSFKL

SEQ ID NO: 5782 - protein, 20 aa, Homo sapiens
NENNRMSIEMEAMKTNILLI

SEQ ID NO: 5783 - protein, 20 aa, Homo sapiens
NGNRTLTLFNVTRNDARAYV

SEQ ID NO: 5784 - protein, 20 aa, Homo sapiens
RHRLLEKIRVLEAEKEKNAY

SEQ ID NO: 5785 - protein, 20 aa, Homo sapiens
NAVASVPIMYSWSPLQQNFM

SEQ ID NO: 5786 - protein, 20 aa, Homo sapiens
RAVRSLLRSHYREVLPLATF

SEQ ID NO: 5787 - protein, 20 aa, Homo sapiens
KDVLKGQNWLIYTYGVTNSG

SEQ ID NO: 5788 - protein, 20 aa, Homo sapiens
QEHLVNSADDVIKMIDMGSA

SEQ ID NO: 5789 - protein, 20 aa, Homo sapiens
QNVSMDLATFMKLRTDAVLP

SEQ ID NO: 5790 - protein, 20 aa, Homo sapiens
VVGQFSKVLPHDSKARRLFV

SEQ ID NO: 5791 - protein, 20 aa, Homo sapiens
SVIKILEDNVLLVELFDSLG

SEQ ID NO: 5792 - protein, 20 aa, Homo sapiens
SVVKDSQVGTVNYMPPEAIK

SEQ ID NO: 5793 - protein, 20 aa, Homo sapiens
QNIPSFAPVLLLATSDKPHS

SEQ ID NO: 5794 - protein, 20 aa, Homo sapiens
VQEIAEKQALAVGNKIVLHT

SEQ ID NO: 5795 - protein, 20 aa, Homo sapiens
LPTAPPNVMSQADTVILDKS

SEQ ID NO: 5796 - protein, 20 aa, Homo sapiens
SWRINGIPQQHTQVLFIAKI

SEQ ID NO: 5797 - protein, 20 aa, Homo sapiens
LKDALEKNQQWLVYDQQREV

SEQ ID NO: 5798 - protein, 20 aa, Homo sapiens
FVVDATRKGNKIRFANHSVN

SEQ ID NO: 5799 - protein, 20 aa, Homo sapiens
IPQDRLTEVIASIIKPQNTY

SEQ ID NO: 5800 - protein, 20 aa, Homo sapiens
QDQTLAELQNNMVLVKLDLR

SEQ ID NO: 5801 - protein, 20 aa, Homo sapiens
IKIQRSNGLIHSANVRTVNL

SEQ ID NO: 5802 - protein, 20 aa, Homo sapiens
PIIRSIPQGIVAAWRQRSSR

SEQ ID NO: 5803 - protein, 20 aa, Homo sapiens
MSQRQVLQVFEQYQKARTQF

SEQ ID NO: 5804 - protein, 20 aa, Homo sapiens
SLPSPGELYAVQVKHVVSPN

SEQ ID NO: 5805 - protein, 20 aa, Homo sapiens
AKGTTEEMKYVLGQLVGLNS

SEQ ID NO: 5806 - protein, 20 aa, Homo sapiens
VRFDSVGGLSNHIAALKEMV

SEQ ID NO: 5807 - protein, 20 aa, Homo sapiens
FPFLDKRYRKIVDVNFQSLL

SEQ ID NO: 5808 - protein, 20 aa, Homo sapiens
TAEENFLQEIKNAKSEASIY

SEQ ID NO: 5809 - protein, 20 aa, Homo sapiens
VNEEATGQFRVYPELPKPSI

SEQ ID NO: 5810 - protein, 20 aa, Homo sapiens
IFELEKKTETAAHSLPQQTK

SEQ ID NO: 5811 - protein, 20 aa, Homo sapiens
YMRLRQLKRFRRADEVKSMF

SEQ ID NO: 5812 - protein, 20 aa, Homo sapiens
YVVELLRSFFYVTETTFQKN

SEQ ID NO: 5813 - protein, 20 aa, Homo sapiens
MSQGILSPPAGLLSDDDVVV

SEQ ID NO: 5814 - protein, 20 aa, Homo sapiens
LLLVHEPKLKVDLTKYLENQ

SEQ ID NO: 5815 - protein, 20 aa, Homo sapiens
SRDPSWRQPERTILRPRFRR

SEQ ID NO: 5816 - protein, 20 aa, Homo sapiens
SKHSVDLAEMVVEAEIFPVV

SEQ ID NO: 5817 - protein, 20 aa, Homo sapiens
SILVQFVDYGSTAKLTLNRL

SEQ ID NO: 5818 - protein, 20 aa, Homo sapiens
VERGAVPLEMLEIALRNLNL

SEQ ID NO: 5819 - protein, 20 aa, Homo sapiens
RKIRKKSNWYLGTIKKRRKI

SEQ ID NO: 5820 - protein, 20 aa, Homo sapiens
AGKLNLSPSQYINEENLPVY

SEQ ID NO: 5821 - protein, 20 aa, Homo sapiens
ELKKHSQENIKFENSISRLT

SEQ ID NO: 5822 - protein, 20 aa, Homo sapiens
QQSTQELFIPNITVNNSGSY

SEQ ID NO: 5823 - protein, 20 aa, Homo sapiens
LKELRKARNQITQLESLKQL

SEQ ID NO: 5824 - protein, 20 aa, Homo sapiens
FLFNLNNDFVVDATRKGNKI

SEQ ID NO: 5825 - protein, 20 aa, Homo sapiens
LWGSRHNERRFLRNTKKFIS

SEQ ID NO: 5826 - protein, 20 aa, Homo sapiens
LNGGLQEEELSTSLKRSVYI

SEQ ID NO: 5827 - protein, 20 aa, Homo sapiens
SLRSRSTRMSTVSELRITAQ

SEQ ID NO: 5828 - protein, 20 aa, Homo sapiens
SGKKAREIDESLIFYKKWEL

SEQ ID NO: 5829 - protein, 20 aa, Homo sapiens
ALALGRLANYNDDLAEAVVK

SEQ ID NO: 5830 - protein, 20 aa, Homo sapiens
SLYLTGAVATIILQVDSEEN

SEQ ID NO: 5831 - protein, 20 aa, Homo sapiens
SEEEKKNLSASTVLTAQESF

SEQ ID NO: 5832 - protein, 20 aa, Homo sapiens
EIVVIGATNRLDSIDPALRR

SEQ ID NO: 5833 - protein, 20 aa, Homo sapiens
ADGTSLDFSTYRSSQMESQF

SEQ ID NO: 5834 - protein, 20 aa, Homo sapiens
STDNLSSNIIIHPSENSDIL

SEQ ID NO: 5835 - protein, 20 aa, Homo sapiens
PNASLLIQNIIQNDTGFYTL

SEQ ID NO: 5836 - protein, 20 aa, Homo sapiens
GETENREKVAASPKSPTAAL

SEQ ID NO: 5837 - protein, 20 aa, Homo sapiens
MFSSNRQKILERTEILNQEW

SEQ ID NO: 5838 - protein, 20 aa, Homo sapiens
RNTKKFISLGKHAKLSLQEL

SEQ ID NO: 5839 - protein, 20 aa, Homo sapiens
SPMFESTAADLGSVVRKNLL

SEQ ID NO: 5840 - protein, 20 aa, Homo sapiens
EEQVHSIRGSSSANPVNSVR

SEQ ID NO: 5841 - protein, 20 aa, Homo sapiens
GLKAEERHRPVRDWILRQRQ

SEQ ID NO: 5842 - protein, 20 aa, Homo sapiens
QEIKAEPGSLLQEYINSINS

SEQ ID NO: 5843 - protein, 20 aa, Homo sapiens
HFYIRKYSQIKDAKVLEKKV

SEQ ID NO: 5844 - protein, 20 aa, Homo sapiens
LNKLQQHSDKIIRLYDYEIT

SEQ ID NO: 5845 - protein, 20 aa, Homo sapiens
KEMVVFPLLYPEVFEKFKIQ

SEQ ID NO: 5846 - protein, 20 aa, Homo sapiens
EENMDITKSHTVAIDNQIFK

SEQ ID NO: 5847 - protein, 20 aa, Homo sapiens
NSISRLTEDKILLENYVRSI

SEQ ID NO: 5848 - protein, 20 aa, Homo sapiens
EPEIQNTTYLWWVNNQSLPV

SEQ ID NO: 5849 - protein, 20 aa, Homo sapiens
IPYMGDEVLDQDGTFIEELI

SEQ ID NO: 5850 - protein, 20 aa, Homo sapiens
HVRKAFKSHVSTLTDLQPYM

SEQ ID NO: 5851 - protein, 20 aa, Homo sapiens
DLKPLLSNEVIWLDSKQIRQ

SEQ ID NO: 5852 - protein, 20 aa, Homo sapiens
KAHTPFRESKLTQVLRDSFI

SEQ ID NO: 5853 - protein, 20 aa, Homo sapiens
RELAVALAQKNVKLSTEQLR

SEQ ID NO: 5854 - protein, 20 aa, Homo sapiens
VRYYSPGYSDTLLQRVDSYQ

SEQ ID NO: 5855 - protein, 20 aa, Homo sapiens
KFKSQSLRSHFEKNTTLHYH

SEQ ID NO: 5856 - protein, 20 aa, Homo sapiens
NPEDWLSLLLKLEKNSVPLS

SEQ ID NO: 5857 - protein, 20 aa, Homo sapiens
ISAKDFEVAMQKMIPASQRA

SEQ ID NO: 5858 - protein, 20 aa, Homo sapiens
LLPNEIAIRPMDKTVLFTDN

SEQ ID NO: 5859 - protein, 20 aa, Homo sapiens
DEVDSVLLSASKILNSSEGV

SEQ ID NO: 5860 - protein, 20 aa, Homo sapiens
EPETQDATYLWWVNNQSLPV

SEQ ID NO: 5861 - protein, 20 aa, Homo sapiens
RQVYEFRVKESSIIAPAPAE

SEQ ID NO: 5862 - protein, 20 aa, Homo sapiens
DGLRPIVNMDYVVGARTFRR

SEQ ID NO: 5863 - protein, 20 aa, Homo sapiens
DISMYGKEELLQVVEAMKTL

SEQ ID NO: 5864 - protein, 20 aa, Homo sapiens
DDVAAINPELLQLLPLHPKD

SEQ ID NO: 5865 - protein, 20 aa, Homo sapiens
LDQDQQEAARAALQGGGPPY

SEQ ID NO: 5866 - protein, 20 aa, Homo sapiens
REIAKHTPELSQLVVNAGGV

SEQ ID NO: 5867 - protein, 20 aa, Homo sapiens
NVWQPDAIEVLQQLLSKRQV

SEQ ID NO: 5868 - protein, 20 aa, Homo sapiens
NESFARIQVRFAELKAIQEP

SEQ ID NO: 5869 - protein, 20 aa, Homo sapiens
LSLEHIGRRRLRSAGAAQKK

SEQ ID NO: 5870 - protein, 20 aa, Homo sapiens
NLNNLNGKTGEFLAFQTVHL

SEQ ID NO: 5871 - protein, 20 aa, Homo sapiens
EKNIQLSLEKQQMMEALDQL

SEQ ID NO: 5872 - protein, 20 aa, Homo sapiens
RNNSIVKSITVSASGTSPGL

SEQ ID NO: 5873 - protein, 20 aa, Homo sapiens
QRGSKKHLLLAPSDVAGWGI

SEQ ID NO: 5874 - protein, 20 aa, Homo sapiens
TYVPLLGSLRTAQTQLSRKL

SEQ ID NO: 5875 - protein, 20 aa, Homo sapiens
QNLVPFRDSKLTRVFQGFFT

SEQ ID NO: 5876 - protein, 20 aa, Homo sapiens
KREEKKAQNSEMRMKRAQEY

SEQ ID NO: 5877 - protein, 20 aa, Homo sapiens
PQAPRRPLPQVATLIDRFVK

SEQ ID NO: 5878 - protein, 20 aa, Homo sapiens
LSEEPEDHIKAAAAWALGQI

SEQ ID NO: 5879 - protein, 20 aa, Homo sapiens
EEFARTTDDYLSNLIKAKSY

SEQ ID NO: 5880 - protein, 20 aa, Homo sapiens
DSRGQTTKARFLYGENMPPQ

SEQ ID NO: 5881 - protein, 20 aa, Homo sapiens
SEKLQLDLSSINISAKDFEV

SEQ ID NO: 5882 - protein, 20 aa, Homo sapiens
RNKKNSRRVSFADTIKVFQT

SEQ ID NO: 5883 - protein, 20 aa, Homo sapiens
DLPTENQEENLSMEKSHHFE

SEQ ID NO: 5884 - protein, 20 aa, Homo sapiens
TVYAEPPKPFITSNNSNPVE

SEQ ID NO: 5885 - protein, 20 aa, Homo sapiens
VVDATRKGNKIRFANHSVNP

SEQ ID NO: 5886 - protein, 20 aa, Homo sapiens
SLLRSHYREVLPLATFVRRL

SEQ ID NO: 5887 - protein, 20 aa, Homo sapiens
QGTIKDGGILPRSLALIFNS

SEQ ID NO: 5888 - protein, 20 aa, Homo sapiens
IRALGQNKAHTPFRESKLTQ

SEQ ID NO: 5889 - protein, 20 aa, Homo sapiens
LFSLGWVQPSRTLAGETGQE

SEQ ID NO: 5890 - protein, 20 aa, Homo sapiens
TNTLPVLLSLYMSTESSEDL

SEQ ID NO: 5891 - protein, 20 aa, Homo sapiens
ISPEKIYVQWLLTENLLNSL

SEQ ID NO: 5892 - protein, 20 aa, Homo sapiens
ISVKGRIYSILKQIGSGGSS

SEQ ID NO: 5893 - protein, 20 aa, Homo sapiens
KIDLHKYLTVKDYLRDIDLI

SEQ ID NO: 5894 - protein, 20 aa, Homo sapiens
QDLIKDPRNLLANQTLVYSQ

SEQ ID NO: 5895 - protein, 20 aa, Homo sapiens
IKNAKSEASIYKNSLSEIGK

SEQ ID NO: 5896 - protein, 20 aa, Homo sapiens
ETQNPVSARRSDSVILNVLY

SEQ ID NO: 5897 - protein, 20 aa, Homo sapiens
IFAKRAIQTGEELFFDYRYS

SEQ ID NO: 5898 - protein, 20 aa, Homo sapiens
TDALRGSGAWGLLLRRVGDD

SEQ ID NO: 5899 - protein, 20 aa, Homo sapiens
PVPANIRFSIWISFFEIYNE

SEQ ID NO: 5900 - protein, 20 aa, Homo sapiens
ETGQEAAPLDGVLANPPNIS

SEQ ID NO: 5901 - protein, 20 aa, Homo sapiens
YYSPGYSDTLLQRVDSYQPL

SEQ ID NO: 5902 - protein, 20 aa, Homo sapiens
YDDGLWYRAKIVAIKEFNPL

SEQ ID NO: 5903 - protein, 20 aa, Homo sapiens
QVLNEKKQIYAIKYVNLEEA

SEQ ID NO: 5904 - protein, 20 aa, Homo sapiens
SLDLSSDFLSLEHIGRRRLR

SEQ ID NO: 5905 - protein, 20 aa, Homo sapiens
FQDLSINSADKIHITRSHIM

SEQ ID NO: 5906 - protein, 20 aa, Homo sapiens
SKMKPLIFTTQSLIQKVETY

SEQ ID NO: 5907 - protein, 20 aa, Homo sapiens
TYLWWVNGQSLPVSPRLQLS

SEQ ID NO: 5908 - protein, 20 aa, Homo sapiens
YRYSQADALKYVGIEREMEI

SEQ ID NO: 5909 - protein, 20 aa, Homo sapiens
SVWSKLQSIGIRQHLKRVQL

SEQ ID NO: 5910 - protein, 20 aa, Homo sapiens
FRDSKLTRVFQGFFTGRGRS

SEQ ID NO: 5911 - protein, 20 aa, Homo sapiens
VIQHLGYLFLKMSPEDIRKW

SEQ ID NO: 5912 - protein, 20 aa, Homo sapiens
AVSMKVFREEDGVLIVDLQK

SEQ ID NO: 5913 - protein, 20 aa, Homo sapiens
LNKLIGRYSQAIEALPPDKY

SEQ ID NO: 5914 - protein, 20 aa, Homo sapiens
RIRSRYSGVNQSMLFDKLIT

SEQ ID NO: 5915 - protein, 20 aa, Homo sapiens
EKLQDGRITIREFFILLQVH

SEQ ID NO: 5916 - protein, 20 aa, Homo sapiens
IAESENQIQPQSALKVLQQQ

SEQ ID NO: 5917 - protein, 20 aa, Homo sapiens
NGIPQQHTQVLFIAKITPNN

SEQ ID NO: 5918 - protein, 20 aa, Homo sapiens
FSVLNYERARRPGLLGASVL

SEQ ID NO: 5919 - protein, 20 aa, Homo sapiens
PRSLALIFNSLQGQLHPTPD

SEQ ID NO: 5920 - protein, 20 aa, Homo sapiens
SLSPEELSSVPPSSIWAVRP

SEQ ID NO: 5921 - protein, 20 aa, Homo sapiens
QDKNQWRRGQIIRMVTDTLV

SEQ ID NO: 5922 - protein, 20 aa, Homo sapiens
ITDSITLKNKTESSLLAKLE

SEQ ID NO: 5923 - protein, 20 aa, Homo sapiens
IYKDRMKIGASLADVDPMQL

SEQ ID NO: 5924 - protein, 20 aa, Homo sapiens
RLLGEEIEYLKRWGPNYNLM

SEQ ID NO: 5925 - protein, 20 aa, Homo sapiens
LHSVEEKLSGDSVNSLPQSV

SEQ ID NO: 5926 - protein, 20 aa, Homo sapiens
VHNLPQHLFGYSWYKGERVD

SEQ ID NO: 5927 - protein, 20 aa, Homo sapiens
AFKSHVSTLTDLQPYMRQFV

SEQ ID NO: 5928 - protein, 20 aa, Homo sapiens
RILRSRRSPLLKSGPFGKKY

SEQ ID NO: 5929 - protein, 20 aa, Homo sapiens
RITKANVDLLPRGAPERQRL

SEQ ID NO: 5930 - protein, 20 aa, Homo sapiens
VGDDGTIFVVPKLSEFELIK

SEQ ID NO: 5931 - protein, 20 aa, Homo sapiens
VQNSHFKEPLVSDEKSSELI

SEQ ID NO: 5932 - protein, 30 aa, Homo sapiens
PIVQNIQGQMVHQAISPRTLNAWVKVVEEK

SEQ ID NO: 5933 - protein, 20 aa, Artificial Sequence
  Description of Artificial Sequence: Synthetic peptide
NSLQKQLQAVLQWIAASQFN

SEQ ID NO: 5934 - protein, 20 aa, Artificial Sequence
  Description of Artificial Sequence: Synthetic peptide
SGDERSDEIVLTVSNSNVEE

SEQ ID NO: 5935 - protein, 20 aa, Artificial Sequence
  Description of Artificial Sequence: Synthetic peptide
VQKEDGRVQAFGWSLPQKYK

SEQ ID NO: 5936 - protein, 20 aa, Artificial Sequence
  Description of Artificial Sequence: Synthetic peptide
EVESTPMIMENIQELIRSAQ

SEQ ID NO: 5937 - protein, 20 aa, Artificial Sequence
  Description of Artificial Sequence: Synthetic peptide
AYFESLLEKREKTNFDPAEW

SEQ ID NO: 5938 - protein, 20 aa, Artificial Sequence
  Description of Artificial Sequence: Synthetic peptide
PSQASSGQARMFPNAPYLPS

SEQ ID NO: 5939 - protein, 20 aa, Artificial Sequence
  Description of Artificial Sequence: Synthetic peptide
RRSIAGFVASINEGMTRWFS

SEQ ID NO: 5940 - protein, 20 aa, Artificial Sequence
  Description of Artificial Sequence: Synthetic peptide
MQDIKMILKMVQLDSIEDLE

SEQ ID NO: 5941 - protein, 20 aa, Artificial Sequence
  Description of Artificial Sequence: Synthetic peptide
ANSVVSDMMVSIMKTLKIQV

SEQ ID NO: 5942 - protein, 20 aa, Artificial Sequence
  Description of Artificial Sequence: Synthetic peptide
REALSNKVDELAHFLLRKYR

SEQ ID NO: 5943 - protein, 20 aa, Artificial Sequence
  Description of Artificial Sequence: Synthetic peptide
ETSYEKVINYLVMLNAREPI

SEQ ID NO: 5944 - protein, 20 aa, Artificial Sequence
  Description of Artificial Sequence: Synthetic peptide
DVKEVDPTGHSFVLVTSLGL

SEQ ID NO: 5945 - protein, 20 aa, Artificial Sequence
  Description of Artificial Sequence: Synthetic peptide
SAQLLQARLMKEESPVVSWR

SEQ ID NO: 5946 - protein, 20 aa, Artificial Sequence
  Description of Artificial Sequence: Synthetic peptide
ISDTKDYFMSKTLGIGRLKR

SEQ ID NO: 5947 - protein, 20 aa, Artificial Sequence
  Description of Artificial Sequence: Synthetic peptide
FDRNTESLFEELSSAGSGLI

SEQ ID NO: 5948 - protein, 20 aa, Artificial Sequence
  Description of Artificial Sequence: Synthetic peptide
SQKMDMSNIVLMLIQKLLNE

SEQ ID NO: 5949 - protein, 20 aa, Artificial Sequence
  Description of Artificial Sequence: Synthetic peptide
SAVFHERYALIQHQKTHKNE

SEQ ID NO: 5950 - protein, 20 aa, Artificial Sequence
  Description of Artificial Sequence: Synthetic peptide
DVKEVDPTSHSYVLVTSLNL

SEQ ID NO: 5951 - protein, 20 aa, Artificial Sequence
  Description of Artificial Sequence: Synthetic peptide
ENAHGQSLEEDSALEALLNF

SEQ ID NO: 5952 - protein, 20 aa, Artificial Sequence
  Description of Artificial Sequence: Synthetic peptide
MASFRKLTLSEKVPPNHPSR

SEQ ID NO: 5953 - protein, 20 aa, Artificial Sequence
  Description of Artificial Sequence: Synthetic peptide
KRASQYSGQLKVLIAENTML

SEQ ID NO: 5954 - protein, 20 aa, Artificial Sequence
  Description of Artificial Sequence: Synthetic peptide
VDPAQLEFMFQEALKLKVAE

SEQ ID NO: 5955 - protein, 20 aa, Artificial Sequence
  Description of Artificial Sequence: Synthetic peptide
EYEREETRQVYMDLNNNIEK

SEQ ID NO: 5956 - protein, 20 aa, Artificial Sequence
  Description of Artificial Sequence: Synthetic peptide
PEIFGKASESLQLVFGIDVK

SEQ ID NO: 5957 - protein, 20 aa, Artificial Sequence
  Description of Artificial Sequence: Synthetic peptide
DSESSFTYTLDEKVAELVEF

SEQ ID NO: 5958 - protein, 9 aa, Homo sapiens
SVASTITGV

SEQ ID NO: 5959 - protein, 9 aa, Homo sapiens
VMAGDIYSV

SEQ ID NO: 5960 - protein, 9 aa, Homo sapiens
ALADGVQKV

SEQ ID NO: 5961 - protein, 9 aa, Homo sapiens
LLGATCMFV

SEQ ID NO: 5962 - protein, 9 aa, Homo sapiens
SVFAGVVGV

SEQ ID NO: 5963 - protein, 9 aa, Homo sapiens
ALFDGDPHL

SEQ ID NO: 5964 - protein, 9 aa, Homo sapiens
YVDPVITSI

SEQ ID NO: 5965 - protein, 9 aa, Homo sapiens
STAPPVHNV

SEQ ID NO: 5966 - protein, 9 aa, Homo sapiens
LAALPHSCL

SEQ ID NO: 5967 - protein, 30 aa, Artificial Sequence
  Description of Artificial Sequence: Synthetic polypeptide
YVDEKAPEFSMQGLKDEKVAELVRFLLRKY

1. A method of providing immunotherapy to a subject in need thereof, the method comprising: administering to the individual a pharmaceutical composition, comprising i) two or more different peptides consisting of an amino acid sequence selected from the group consisting of SEQ ID Nos: 1 to 2786 and 5432 to 5931 and ii) a pharmaceutically acceptable adjuvant, diluent, carrier, preservative, or a combination thereof, thereby inducing an immune response.

2. The method of claim 1, further comprising:
predicting that the subject will have a CD8+ T cell response and/or a CD4+ T cell response to each peptide of the pharmaceutical composition by,
(i) a) determining that each peptide comprises at least one amino acid sequence that is a T cell epitope capable of binding to at least three HLA class I molecules of the subject; and
b) predicting that the subject will have a CD8+ T cell response to each peptide of the pharmaceutical composition or each peptide, polynucleic acid or vector of the kit; and
(ii) a) determining that each peptide comprises at least one amino acid sequence that is a T cell epitope capable of binding to at least three HLA class II molecules of the subject; and
b) predicting that the subject will have a CD4+ T cell response to each peptide of the pharmaceutical composition.

3. The method of claim 1, wherein the pharmaceutical composition comprises at least 3, at least 4, at least 5, at least 6, at least 7, at least 8, at least 9, at least 10, at least 11, or at least 12 different peptides, wherein each peptide consists of an amino acid sequence selected from the group consisting of SEQ ID Nos: 1 to 2786 and 5432 to 5931.

4. The method of claim 1, wherein the peptides of the pharmaceutical composition are from different cancer associated antigens selected from Table 24.

5. The method of claim 1, wherein the adjuvant comprises an aluminium salt, saponin, Lipid A, or a water-in-oil emulsion.

6. The method according to claim 1, wherein the immunotherapy is a treatment for cancer.

7. The method of claim 6, wherein the cancer is bladder cancer, brain cancer, breast cancer, colorectal cancer, gastric cancer, hepatocellular cancer, leukemia, lung cancer, lymphoma, melanoma, ovarian cancer, pancreatic cancer, pediatric cancer, thyroid cancer, prostate cancer, kidney cancer, head and neck cancer, esophageal cancer and cervical cancer.

8. A pharmaceutical composition, comprising
(a) at least two peptides consisting of 15 to 50 amino acids in length, wherein each peptide comprises a different sequence and which binds to at least three HLA class II alleles and at least three HLA class I alleles; and
(b) an immunological adjuvant.

9. The pharmaceutical composition of claim 8, wherein the at least two peptides each comprise a different sequence selected from SEQ ID Nos: 1 to 2786 and/or 5432 to 5931.

10. The pharmaceutical composition of claim 8, comprising at least 3, at least 4, at least 5, at least 6, at least 7, at least 8, at least 9, at least 10, at least 11, or at least 12 different peptides, wherein each peptide comprises an amino acid sequence selected from the group consisting of SEQ ID Nos: 1 to 2786 and 5432 to 5931.

11. The pharmaceutical composition of claim 8, wherein the peptides are from different cancer associated antigens selected from Table 24.

12. The pharmaceutical composition of claim 8, wherein the adjuvant comprises an aluminium salt, saponin, Lipid A, or a water-in-oil emulsion.

13. A method of designing or preparing a peptide, or a polynucleic acid or vector that encodes a peptide, or a panel of peptides, or one or more polynucleic acid or vectors that encode a panel of peptides, for use in a method of inducing a T cell response against a target polypeptide, the method comprising
(i) selecting or defining a model human population comprising a plurality of subjects each defined by HLA class I genotype and/or by HLA class II genotype;
(ii) identifying for each subject of the model population:
(a) amino acid sequences of the target polypeptide that are a T cell epitope capable of binding to at least three HLA class I molecules of the subject;
(b) amino acid sequences of the target polypeptide that are a T cell epitope capable of binding to at least three HLA class II molecules of the subject;
(c) amino acid sequences of the target polypeptide that comprise a T cell epitope capable of binding to at least three HLA class I molecules of the subject and a T cell epitope capable of binding to at least three HLA class II molecules of the subject; or
(d) amino acid sequences of the target polypeptide that both
a. are a T cell epitope capable of binding to at least three HLA class II molecules; and
b. comprise an amino acid sequence that is a T cell epitope capable of binding to at least three HLA class I molecules of the subject;
(iii) selecting a polypeptide fragment window length of between 9 and 50 amino acids;
(iv) identifying a fragment of the target polypeptide that
(a) has the length selected in step (iii); and
(b) comprises an amino acid sequence identified in any one of step (ii) (a) to (c) in the highest proportion of subjects in the model population; and
(v) designing or preparing a peptide, a polynucleic acid or vector that encodes a peptide, a panel of peptides, or one or more polynucleic acids or vectors that encode a panel of peptides, wherein each peptide comprises one or more of the target polypeptide fragments identified in step (iv).

14. The method of claim 13, wherein the polypeptide fragment is flanked at the N and/or C terminus by additional amino acids that are not part of the sequence of the target polypeptide antigen.

15. The method of claim 13, further comprising (v) testing the fragment identified in step (iv) against additional pre-defined criteria, rejecting the fragment if the further pre-defined criteria are not met, and repeating step (iv) to identify an alternative fragment of the target polypeptide that has the length selected in step (iii); and comprises an amino acid sequence identified in step (iv) in the next highest proportion of subjects in the model population.

16. The method of claim 15, further comprising repeating step (iv) and step (v) in one or more further rounds, wherein a further fragment of the target polypeptide is identified in each round, and wherein in each round subjects are excluded from the model population if any of the fragments selected in step (iv) and not rejected in step (v) of any of the preceding rounds comprises an amino acid sequence identified in step (ii) for that subject.

17. The method according to claim 13, wherein the target polypeptide is expressed by pathogenic organism, a virus or a cancer cell, or is a cancer testes antigen, optionally wherein the target polypeptide is selected from the antigens listed in any of Tables 2 to 5.

18. The method according to claim 13, further comprising selecting two or more peptides, polynucleic acids or vectors designed or prepared according to the method of claim 9 for use in a method of vaccinating, providing immunotherapy to, or inducing a cytotoxic and/or helper T cell response in a subject, wherein each of the two or more peptides or encoded peptides comprises an amino acid sequence that is
(a) a fragment of a polypeptide that is expressed by a pathogenic organism, a virus or a cancer cell; and
(b) a T cell epitope capable of binding to at least three HLA class I molecules of the subject or a T cell epitope capable of binding to at least three HLA class II molecules of the subject;
and wherein the method further comprises administering the one or more peptides, polynucleic acids or vectors to the subject.
